(19) United States
(12) Patent Application Publication
(10) Pub. No.: US 2025/0205363 A1
(43) Pub. Date: Jun. 26, 2025

(54) FUNCTIONAL AAV CAPSIDS FOR SYSTEMIC ADMINISTRATION

(71) Applicant: SHAPE THERAPEUTICS INC., Seattle, WA (US)

(72) Inventors: Thomas PACKARD, Seattle, WA (US); David Jeffrey HUSS, Seattle, WA (US); Francois VIGNEAULT, Seattle, WA (US); Adrian Wrangham BRIGGS, Seattle, WA (US); Ronald James HAUSE, JR., Seattle, WA (US); Kevin Christopher STEIN, Kenmore, WA (US); Yue JIANG, Los Angeles, CA (US)

(21) Appl. No.: 18/714,511

(22) PCT Filed: Nov. 30, 2022
(86) PCT No.: PCT/US2022/051452

§ 371 Date: May 29, 2024

Related U.S. Application Data
(60) Provisional application No. 63/284,977, filed on Dec. 1, 2021.
(60) Provisional application No. 63/342,032, filed on May 13, 2022.
(60) Provisional application No. 63/354,635, filed on Jun. 22, 2022.
(60) Provisional application No. 63/399,164, filed on Aug. 18, 2022.

(51) Int. Cl. A61K 48/00; C07K 14/005; C12N 9/22; C12N 9/80; C12N 15/11; C12N 15/86

(52) U.S. Cl. CPC A61K 48/005; A61K 48/0075; A61K 48/0083; C07K 14/005; C12N 9/22; C12N 9/80; C12N 15/111; C12N 15/86; C12N 2310/20; C12N 2750/14122; C12N 2750/14143; C12N 2750/14145; C12Y 305/04004

(57) ABSTRACT

Disclosed herein are engineered AAV VP capsid polypeptides with the ability to assemble into virus particles and having improved tissue tropism to, for example, CNS tissues or muscle tissues. The capsids are engineered using the high throughput discovery system described herein. In certain embodiments, provided herein are recombinant adeno-associated virus (AAV) VP capsid polypeptides having at least one mutation in a 581-589 region of the VP capsid polypeptide, corresponding to residues 581 to residue 589 of a VP1 polypeptide of SEQ ID NO: 1.

### CROSS-REFERENCE

[0001] The present application claims the benefit of U.S. Provisional Application No. 63/284,977, entitled “FUNCTIONAL AAV CAPSIDS FOR SYSTEMIC ADMINISTRATION,” filed on Dec. 1, 2021, U.S. Provisional Application No. 63/342,032, entitled “FUNCTIONAL AAV CAPSIDS FOR SYSTEMIC ADMINISTRATION,” filed on May 13, 2022, U.S. Provisional Application No. 63/354,635, entitled “FUNCTIONAL AAV CAPSIDS FOR SYSTEMIC ADMINISTRATION,” filed on Jun. 22, 2022, and U.S. Provisional Application No. 63/399,164, entitled “FUNCTIONAL AAV CAPSIDS FOR SYSTEMIC ADMINISTRATION,” filed on Aug. 18, 2022, each of which applications are herein incorporated by reference in their entireties for all purposes.

### SEQUENCE LISTING

[0002] The instant application contains a Sequence Listing which has been submitted electronically in eXtensible Markup Language (XML) format and is hereby incorporated by reference in its entirety. Said XML copy, created on Nov. 28, 2022, is named “421688-705021_SL.xml” and is 5 megabytes in size.

### BACKGROUND

[0003] Recombinant adeno-associated viruses (rAAV) provide the leading platform for in vivo delivery of gene therapies. Current clinical trials employ a limited number of AAV capsids, primarily from naturally occurring human or primate serotypes such as AAV1, AAV2, AAV5, AAV6, AAV8, AAV9, AAVrh.10, AAV4rh.74, and AAVhu.67. These capsids often provide suboptimal targeting to tissues of interest, both due to poor infectivity of the tissue of interest and competing liver tropism. Increasing the dose to ensure infection of desired tissues can lead to dose-dependent liver toxicity. In addition, use of naturally-occurring capsids presents an immunological memory challenge—pre-immune patient populations are excluded from treatment and repeat dosing in a previously immune naïve patient is often not possible. Thus, there is a need for additional AAV capsids for use in gene therapy, in particular capsids that confer upon the rAAV high infectivity for specific tissues, such as muscle tissue and tissues in the central nervous system, and low liver tropism

### SUMMARY OF THE INVENTION

[0004] Described herein is a system for high throughput engineering of functional AAV capsids with altered tropism for various tissues and capsid variants that have increased tropism for target tissues, such as muscle or central nervous system (CNS) tissues.

[0005] In various aspects, the present disclosure provides a viral protein (VP) capsid polypeptide, wherein the VP capsid polypeptide comprises a 581-589 region corresponding to residues 581 to 589 a VP1 polypeptide, wherein the 581-589 region comprises at least one amino acid substitution as compared to SEQ ID NO: 9, and wherein a recombinant viral capsid comprising the VP capsid polypeptide is capable of preferentially targeting a central nervous system (CNS) tissue at a DNA enrichment of at least 100-fold greater than a wild type AAV9.

[0006] In some aspects, the 581-589 region has a sequence selected from the group consisting of SEQ ID NO: 18, SEQ ID NO: 3472, SEQ ID NO: 262, SEQ ID NO: 3306, SEQ ID NO: 2028, SEQ ID NO: 2791, SEQ ID NO: 424, SEQ ID NO: 2536, SEQ ID NO: 1971, SEQ ID NO: 415, SEQ ID NO: 3846, SEQ ID NO: 3283, SEQ ID NO: 1956, SEQ ID NO: 3297, SEQ ID NO: 4545, SEQ ID NO: 2661, SEQ ID NO: 1576, SEQ ID NO: 425, SEQ ID NO: 709, SEQ ID NO: 2168, SEQ ID NO: 54, SEQ ID NO: 429, SEQ ID NO: 708, SEQ ID NO: 428, SEQ ID NO: 4119, SEQ ID NO: 3906, SEQ ID NO: 2456, SEQ ID NO: 2278, SEQ ID NO: 5006, SEQ ID NO: 426, SEQ ID NO: 307, SEQ ID NO: 5155, SEQ ID NO: 2640, SEQ ID NO: 4317, SEQ ID NO: 1145, SEQ ID NO: 430, and SEQ ID NO: 885. In some aspects, the recombinant viral capsid is capable of preferentially targeting the CNS tissue at a DNA enrichment of at least 200-fold greater than the wild type AAV9. In some aspects, the 581-589 region has a sequence selected from the group consisting of SEQ ID NO: 18, SEQ ID NO: 3472, SEQ ID NO: 262, SEQ ID NO: 3306, SEQ ID NO: 2028, SEQ ID NO: 2791, SEQ ID NO: 424, SEQ ID NO: 2536, SEQ ID NO: 1971, SEQ ID NO: 415, SEQ ID NO: 3846, SEQ ID NO: 3283, SEQ ID NO: 1956, and SEQ ID NO: 3297. In some aspects, the recombinant viral capsid is capable of preferentially targeting the CNS tissue at a DNA enrichment of at least 1000-fold greater than the wild type AAV9. In some aspects, the 581-589 region has a sequence of SEQ ID NO: 18.

[0007] In various aspects, the present disclosure provides a viral protein (VP) capsid polypeptide, wherein the VP capsid polypeptide comprises a 581-589 region corresponding to residues 581 to 589 a VP1 polypeptide, wherein the 581-589 region comprises at least one amino acid substitution as compared to SEQ ID NO: 9, and wherein a recombinant viral capsid comprising the VP capsid polypeptide is capable of preferentially targeting a central nervous system (CNS) tissue at an RNA enrichment of at least 100-fold greater than a wild type AAV9.

[0008] In some aspects, the 581-589 region has a sequence selected from the group consisting of SEQ ID NO: 18, SEQ ID NO: 3472, SEQ ID NO: 262, SEQ ID NO: 3306, SEQ ID NO: 2028, SEQ ID NO: 2791, SEQ ID NO: 424, SEQ ID NO: 2536, SEQ ID NO: 1971, SEQ ID NO: 415, SEQ ID NO: 3283, SEQ ID NO: 1956, SEQ ID NO: 3297, SEQ ID NO: 4545, SEQ ID NO: 2661, SEQ ID NO: 1576, SEQ ID NO: 425, SEQ ID NO: 709, SEQ ID NO: 54, SEQ ID NO: 429, SEQ ID NO: 428, SEQ ID NO: 426, and SEQ ID NO: 430. In some aspects, the recombinant viral capsid is capable of preferentially targeting the CNS tissue at an RNA enrichment of at least 200-fold or greater than the wild type AAV9. In some aspects, the 581-589 region has a sequence selected from the group consisting of SEQ ID NO: 18, SEQ ID NO: 3472, SEQ ID NO: 262, SEQ ID NO: 3306, SEQ ID NO: 2028, SEQ ID NO: 2791, SEQ ID NO: 424, SEQ ID NO: 2536, SEQ ID NO: 1971, SEQ ID NO: 415, SEQ ID NO: 3283, SEQ ID NO: 1956, SEQ ID NO: 2661, SEQ ID NO: 1576, SEQ ID NO: 425, SEQ ID NO: 709, SEQ ID NO: 54, SEQ ID NO: 430, SEQ ID NO: 569, and SEQ ID NO: 719. In some aspects, the recombinant viral capsid is capable of preferentially targeting the CNS tissue at an RNA enrichment of at least 500-fold or greater than the wild type AAV9. In some aspects, the 581-589 region has a sequence selected from the group consisting of SEQ ID NO: 18, SEQ ID NO: 3472, SEQ ID NO: 262, and SEQ ID NO: 2028.

[0009] In various aspects, the present disclosure provides a viral protein (VP) capsid polypeptide, wherein the VP capsid polypeptide comprises a 581-589 region corresponding to residues 581 to 589 a VP1 polypeptide, wherein the 581-589 region comprises at least one amino acid substitution as compared to SEQ ID NO: 9, and wherein a recombinant viral capsid comprising the VP capsid polypeptide is capable of preferentially targeting a central nervous system (CNS) tissue at a DNA enrichment of at least 5-fold greater than a wild type AAV5.

[0010] In some aspects, the 581-589 region has a sequence selected from the group consisting of SEQ ID NO: 18, SEQ ID NO: 3472, SEQ ID NO: 262, SEQ ID NO: 3306, SEQ ID NO: 2028, SEQ ID NO: 2791, SEQ ID NO: 424, SEQ ID NO: 2536, SEQ ID NO: 1971, SEQ ID NO: 415, SEQ ID NO: 3846, SEQ ID NO: 3283, SEQ ID NO: 1956, SEQ ID NO: 3297, SEQ ID NO: 4545, SEQ ID NO: 2661, and SEQ ID NO: 1576. In some aspects, the recombinant viral capsid is capable of preferentially targeting the CNS tissue at a DNA enrichment of at least 10-fold greater than the wild type AAV5. In some aspects, the 581-589 region has a sequence selected from the group consisting of SEQ ID NO: 18, SEQ ID NO: 3472, SEQ ID NO: 262, SEQ ID NO: 3306, SEQ ID NO: 2028, SEQ ID NO: 2791, and SEQ ID NO: 424.

[0011] In various aspects, the present disclosure provides a viral protein (VP) capsid polypeptide, wherein the VP capsid polypeptide comprises a 581-589 region corresponding to residues 581 to 589 a VP1 polypeptide, wherein the 581-589 region comprises at least one amino acid substitution as compared to SEQ ID NO: 9, and wherein a recombinant viral capsid comprising the VP capsid polypeptide is capable of preferentially targeting a central nervous system (CNS) tissue at an RNA enrichment of at least 5-fold greater than a wild type AAV5.

[0012] In some aspects, the 581-589 region has a sequence selected from the group consisting of SEQ ID NO: 18, SEQ ID NO: 3472, SEQ ID NO: 262, SEQ ID NO: 3306, SEQ ID NO: 2028, SEQ ID NO: 2791, SEQ ID NO: 424, SEQ ID NO: 2536, SEQ ID NO: 1971, SEQ ID NO: 415, SEQ ID NO: 3283, SEQ ID NO: 1956, SEQ ID NO: 3297, SEQ ID NO: 4545, SEQ ID NO: 2661, SEQ ID NO: 1576, SEQ ID NO: 425, SEQ ID NO: 709, SEQ ID NO: 54, SEQ ID NO: 429, SEQ ID NO: 708, SEQ ID NO: 428, SEQ ID NO: 426, SEQ ID NO: 307, SEQ ID NO: 4317, SEQ ID NO: 430, and SEQ ID NO: 885. In some aspects, the recombinant viral capsid is capable of preferentially targeting the CNS tissue at an RNA enrichment of at least 20-fold greater than the wild type AAV5. In some aspects, the 581-589 region has a sequence selected from the group consisting of SEQ ID NO: 18, SEQ ID NO: 3472, SEQ ID NO: 262, SEQ ID NO: 3306, SEQ ID NO: 2028, SEQ ID NO: 2791, SEQ ID NO: 424, SEQ ID NO: 2536, SEQ ID NO: 1971, SEQ ID NO: 415, SEQ ID NO: 3283, SEQ ID NO: 1956, SEQ ID NO: 2661, SEQ ID NO: 1576, SEQ ID NO: 425, SEQ ID NO: 709, SEQ ID NO: 54, SEQ ID NO: 430, SEQ ID NO: 569, and SEQ ID NO: 719.

[0013] In various aspects, the present disclosure provides a viral protein (VP) capsid polypeptide, wherein the VP capsid polypeptide comprises a 581-589 region corresponding to residues 581 to 589 of a VP1 polypeptide; wherein the 581-589 region has a sequence that is at least 85% identical to: (a) SEQ ID NO: 18, (b) SEQ ID NO: 3472, (c) SEQ ID NO: 262, (d) SEQ ID NO: 3306, (e) SEQ ID NO: 2028, (f) SEQ ID NO: 2791, (g) SEQ ID NO: 424, (h) SEQ ID NO: 2536, (i) SEQ ID NO: 1971, (j) SEQ ID NO: 415, (k) SEQ ID NO: 3846, (l) SEQ ID NO: 3283, (m) SEQ ID NO: 1956, (n) SEQ ID NO: 3297, (o) SEQ ID NO: 4545, (p) SEQ ID NO: 2661, (q) SEQ ID NO: 1576, (r) SEQ ID NO: 425, (s) SEQ ID NO: 709, (t) SEQ ID NO: 2168, (u) SEQ ID NO: 54, (v) SEQ ID NO: 429, (w) SEQ ID NO: 708, (x) SEQ ID NO: 428, (y) SEQ ID NO: 4119, (z) SEQ ID NO: 3906, (aa) SEQ ID NO: 2456, (bb) SEQ ID NO: 2278, (cc) SEQ ID NO: 5006, or (dd) SEQ ID NO: 426.

[0014] In some aspects, the 581-589 region has a sequence of: (a) SEQ ID NO: 18, (b) SEQ ID NO: 3472, (c) SEQ ID NO: 262, (d) SEQ ID NO: 3306, (e) SEQ ID NO: 2028, (f) SEQ ID NO: 2791, (g) SEQ ID NO: 424, (h) SEQ ID NO: 2536, (i) SEQ ID NO: 1971, (j) SEQ ID NO: 415, (k) SEQ ID NO: 3846, (l) SEQ ID NO: 3283, (m) SEQ ID NO: 1956, (n) SEQ ID NO: 3297, (o) SEQ ID NO: 4545, (p) SEQ ID NO: 2661, (q) SEQ ID NO: 1576, (r) SEQ ID NO: 425, (s) SEQ ID NO: 709, (t) SEQ ID NO: 2168, (u) SEQ ID NO: 54, (v) SEQ ID NO: 429, (w) SEQ ID NO: 708, (x) SEQ ID NO: 428, (y) SEQ ID NO: 4119, (z) SEQ ID NO: 3906, (aa) SEQ ID NO: 2456, (bb) SEQ ID NO: 2278, (cc) SEQ ID NO: 5006, or (dd) SEQ ID NO: 426.

[0015] In various aspects, the present disclosure provides a viral protein (VP) capsid polypeptide, 581-589 wherein the VP capsid polypeptide comprises a 581-589 region corresponding to residues 581 to 589 of a VP1 polypeptide; wherein the 581-589 region has a sequence that is at least 85% identical to any one of any one of SEQ ID NO: 12-SEQ ID NO: 3937 or SEQ ID NO: 3938-SEQ ID NO: 4237.

[0016] In some aspects, the 581-589 region has a sequence of any one of any one of SEQ ID NO: 12-SEQ ID NO: 3937 or SEQ ID NO: 3938-SEQ ID NO: 4237. In some aspects, the VP capsid polypeptide is capable of assembling into a recombinant viral capsid.

[0017] In various aspects, the present disclosure provides a viral protein (VP) capsid polypeptide, wherein the VP capsid polypeptide is capable of assembling into a recombinant viral capsid, and wherein the VP capsid polypeptide comprises a 581-589 region corresponding to residues 581 to 589 of a VP1 polypeptide; wherein the 581-589 region: comprises at least one amino acid substitution as compared to SEQ ID NO: 9, and confers on the recombinant viral capsid an infection rate for central nervous system (CNS) tissue with at least 3-fold higher CNS tissue tropism than a wild type VP capsid polypeptide of SEQ ID NO: 1; wherein the VP capsid polypeptide comprises at least one amino acid substitution as compared to each of SEQ ID NO: 3, SEQ ID NO: 4, SEQ ID NO: 5, SEQ ID NO: 6, SEQ ID NO: 7, and SEQ ID NO: 8.

[0018] In some aspects, the 581-589 region comprises a sequence of X¹X²X³X⁴X⁵X⁶X⁷X⁸X⁹, wherein X¹, X², X³, X⁴, X⁵, X⁶, X⁷, X⁸, and X⁹ are each individually selected from A, R, N, D, C, E, Q, G, H, I, L, K, M, F, P, S, T, W, Y, and V. In some aspects, the VP capsid polypeptide has a sequence of SEQ ID NO: 2, wherein residues 581 to 589 of SEQ ID NO: 2 (X¹X²X³X⁴X⁵X⁶X⁷X⁸X⁹) correspond to the 581-589 region. In some aspects, the 581-589 region has a sequence that is at least 70%, at least 77%, at least 80%, at least 88%, at least 90%, or at least 95% identical to any one of SEQ ID NO: 12-SEQ ID NO: 3937. In some aspects, the 581-589 region has a sequence of any one of SEQ ID NO: 12-SEQ ID NO: 3937. In some aspects, the 581-589 region has a sequence that is at least 70%, at least 77%, at least 80%, at least 88%, at least 90%, or at least 95% identical to any one of SEQ ID NO: 3938-SEQ ID NO: 4237. In some aspects, the 581-589 region has a sequence of any one of SEQ ID NO: 3938-SEQ ID NO: 4237.

[0019] In some aspects, the VP capsid polypeptide comprises an amino acid sequence at least 70%, at least 80%, at least 85%, at least 90%, at least 95%, at least 97%, at least 98%, at least 98.5%, at least 99%, or at least 99.5% identical to SEQ ID NO: 1. In some aspects, the infection rate for CNS tissue is at least 2.5-fold, at least 3-fold, at least 3.5-fold, at least 4-fold, at least 5-fold, at least 10-fold, at least 20-fold, at least 50-fold, at least 75-fold, at least 100-fold, at least 200-fold, at least 500-fold, or at least 1000-fold higher than an infection rate of the wild type VP capsid polypeptide for CNS tissue. In some aspects, the 581-589 region confers on a recombinant viral capsid assembled from the VP capsid polypeptide improved stability compared to a wild type AAV5 capsid comprising a peptide of SEQ ID NO: 1. In some aspects, the 581-589 region confers lower toxicity upon administration to a subject compared to a wild type VP capsid polypeptide of SEQ ID NO: 1. In some aspects, the CNS tissue is selected from forebrain cortex, occipital cortex, temporal cortex, thalamus, hypothalamus, substantia nigra, hippocampus DG, hippocampus CA1, hippocampus CA3, cerebellum, and any combination thereof.

[0020] In various aspects, the present disclosure provides a pharmaceutical composition comprising a VP capsid polypeptide as described herein.

[0021] In some aspects, the VP capsid polypeptide is assembled into a recombinant viral capsid. In some aspects, the pharmaceutical composition further comprises a payload encapsidated by the recombinant viral capsid. In some aspects, the payload encodes a therapeutic polynucleotide or a therapeutic peptide. In some aspects, the payload encodes a guide RNA, a tRNA, a suppressor tRNA, a siRNA, a miRNA, an mRNA, a shRNA, a circular RNA, or an antisense oligonucleotide (ASO), a ribozyme, a DNAzyme, an aptamer, or any combination thereof. In some aspects, the payload encodes a component of a CRISPR/Cas system, an adenosine deaminase acting on RNA (ADAR) enzyme, a transcriptional activator, or a transcriptional repressor.

[0022] In various aspects, the present disclosure provides a recombinant adeno-associated virus (rAAV), comprising a VP capsid polypeptide as described herein assembled into a recombinant viral capsid and a payload encapsidated by the recombinant viral capsid.

[0023] In some aspects, the rAAV further comprises a VP2 polypeptide comprising the 581-589 region and a VP3 polypeptide comprising the 581-589 region. In some aspects, the payload encodes a therapeutic polynucleotide or a therapeutic peptide. In some aspects, the payload encodes a guide RNA, a tRNA, a suppressor tRNA, a siRNA, a miRNA, an mRNA, a shRNA, a circular RNA, or an antisense oligonucleotide (ASO), a ribozyme, a DNAzyme, an aptamer, or any combination thereof. In some aspects, the payload encodes a component of a CRISPR/Cas system, an adenosine deaminase acting on RNA (ADAR) enzyme, a transcriptional activator, or a transcriptional repressor.

[0024] In various aspects, the present disclosure provides a method of delivering a payload to a central nervous system (CNS) tissue of a subject, the method comprising: administering a recombinant adeno-associated virus (rAAV) to the subject, wherein the rAAV encapsidates the payload, and wherein the rAAV comprises a VP capsid polypeptide comprising a 581-589 region corresponding to residues 581 to 589 of a VP1 polypeptide, wherein the 581-589 region comprises at least one amino acid substitution as compared to SEQ ID NO: 9; infecting the CNS tissue with the rAAV; and preferentially delivering the payload to the CNS tissue infected by the rAAV at a DNA enrichment of at least 100-fold greater than a wild type AAV9.

[0025] In some aspects, the DNA enrichment is at least 200-fold greater than the wild type AAV9. In some aspects, the DNA enrichment is at least 1000-fold greater than the wild type AAV9.

[0026] In various aspects, the present disclosure provides a method of transcribing a payload in a central nervous system (CNS) tissue of a subject, the method comprising: administering a recombinant adeno-associated virus (rAAV) to the subject, wherein the rAAV encapsidates the payload, and wherein the rAAV comprises a VP capsid polypeptide comprising a 581-589 region corresponding to residues 581 to 589 of a VP1 polypeptide, wherein the 581-589 region comprises at least one amino acid substitution as compared to SEQ ID NO: 9; infecting the CNS tissue with the rAAV; and preferentially transcribing the payload to the CNS tissue infected by the rAAV at an RNA enrichment of at least 100-fold greater than a wild type AAV9.

[0027] In some aspects, the DNA enrichment is at least 200-fold greater than the wild type AAV9. In some aspects, the DNA enrichment is at least 500-fold greater than the wild type AAV9.

[0028] In various aspects, the present disclosure provides a method of delivering a payload to a central nervous system (CNS) tissue of a subject, the method comprising: administering a recombinant adeno-associated virus (rAAV) to the subject, wherein the rAAV encapsidates the payload, and wherein the rAAV comprises a VP capsid polypeptide comprising a 581-589 region corresponding to residues 581 to 589 of a VP1 polypeptide, wherein the 581-589 region comprises at least one amino acid substitution as compared to SEQ ID NO: 9; infecting the CNS tissue with the rAAV; and preferentially delivering the payload to the CNS tissue infected by the rAAV at a DNA enrichment of at least 5-fold greater than a wild type AAV5.

[0029] In some aspects, the DNA enrichment is at least 10-fold greater than the wild type AAV5.

[0030] In various aspects, the present disclosure provides a method of transcribing a payload in a central nervous system (CNS) tissue of a subject, the method comprising: administering a recombinant adeno-associated virus (rAAV) to the subject, wherein the rAAV encapsidates the payload, and wherein the rAAV comprises a VP capsid polypeptide comprising a 581-589 region corresponding to residues 581 to 589 of a VP1 polypeptide, wherein the 581-589 region comprises at least one amino acid substitution as compared to SEQ ID NO: 9; infecting the CNS tissue with the rAAV; and preferentially transcribing the payload to the CNS tissue infected by the rAAV at an RNA enrichment of at least 5-fold greater than a wild type AAV5.

[0031] In some aspects, the DNA enrichment is at least 20-fold greater than the wild type AAV5.

[0032] In various aspects, the present disclosure provides a method of delivering a payload to a central nervous system (CNS) tissue of a subject, the method comprising: administering a recombinant adeno-associated virus (rAAV) to the subject, wherein the rAAV encapsidates the payload, and wherein the rAAV comprises a VP capsid polypeptide comprising a 581-589 region corresponding to residues 581 to 589 of a VP1 polypeptide, wherein the 581-589 region has a sequence that is at least 85% identical to: (a) SEQ ID NO: 18, (b) SEQ ID NO: 3472, (c) SEQ ID NO: 262, (d) SEQ ID NO: 3306, (e) SEQ ID NO: 2028, (f) SEQ ID NO: 2791, (g) SEQ ID NO: 424, (h) SEQ ID NO: 2536, (i) SEQ ID NO: 1971, (j) SEQ ID NO: 415, (k) SEQ ID NO: 3846, (l) SEQ ID NO: 3283, (m) SEQ ID NO: 1956, (n) SEQ ID NO: 3297, (o) SEQ ID NO: 4545, (p) SEQ ID NO: 2661, (q) SEQ ID NO: 1576, (r) SEQ ID NO: 425, (s) SEQ ID NO: 709, (t) SEQ ID NO: 2168, (u) SEQ ID NO: 54, (v) SEQ ID NO: 429, (w) SEQ ID NO: 708, (x) SEQ ID NO: 428, (y) SEQ ID NO: 4119, (z) SEQ ID NO: 3906, (aa) SEQ ID NO: 2456, (bb) SEQ ID NO: 2278, (cc) SEQ ID NO: 5006, or (dd) SEQ ID NO: 426; infecting the CNS tissue with the rAAV with at least 3-fold higher CNS tissue tropism as compared to a wild type AAV5 capsid comprising a peptide of SEQ ID NO: 1; and delivering the payload to the CNS tissue infected by the rAAV.

[0033] In various aspects, the present disclosure provides a method of delivering a payload to a central nervous system (CNS) tissue of a subject, the method comprising: administering a recombinant adeno-associated virus (rAAV) to the subject, wherein the rAAV encapsidates the payload, and wherein the rAAV comprises a VP capsid polypeptide comprising a 581-589 region corresponding to residues 581 to 589 of a VP1 polypeptide, wherein the 581-589 region comprises at least one amino acid substitution as compared to residues 581 to 589 of SEQ ID NO: 1, and wherein the VP capsid polypeptide comprises at least one amino acid substitution as compared to each of SEQ ID NO: 3, SEQ ID NO: 4, SEQ ID NO: 5, SEQ ID NO: 6, SEQ ID NO: 7, and SEQ ID NO: 8; infecting the CNS tissue with the rAAV with at least 3-fold higher CNS tissue tropism as compared to a wild type AAV5 capsid comprising a peptide of SEQ ID NO: 1; and delivering the payload to the CNS tissue infected by the rAAV.

[0034] In various aspects, the present disclosure provides a method of delivering a payload to a central nervous system (CNS) tissue of a subject, the method comprising: administering a recombinant adeno-associated virus (rAAV) to the subject, wherein the rAAV encapsidates the payload, and wherein the rAAV comprises a VP capsid polypeptide as described herein; infecting the CNS tissue with the rAAV; and delivering the payload to the CNS tissue infected by the rAAV.

[0035] In some aspects, the method further comprises expressing a therapeutic polypeptide or a therapeutic polynucleotide encoded by the payload in the CNS tissue infected by the rAAV. In some aspects, the method further comprises producing a therapeutic effect in the CNS tissue of the subject. In some aspects, the therapeutic effect is produced upon administration of from 1×10⁵ to 5×10¹⁴ rAAVs per kg subject weight. In some aspects, the method comprises administering an amount of the rAAV sufficient to produce the therapeutic effect without producing a toxicity in the subject. In some aspects, the CNS tissue comprises forebrain cortex, occipital cortex, temporal cortex, thalamus, hypothalamus, substantia nigra, hippocampus DG, hippocampus CA1, hippocampus CA3, cerebellum, or a combination thereof.

[0036] In various aspects, the present disclosure provides a method of treating a condition in a subject, the method comprising: administering a recombinant adeno-associated virus (rAAV) to the subject, wherein the rAAV encapsidates a payload, and wherein the rAAV comprises a VP capsid polypeptide comprising a 581-589 region corresponding to residues 581 to 589 of a VP1 polypeptide, wherein the 581-589 region comprises at least one amino acid substitution as compared to SEQ ID NO: 9; infecting a central nervous system (CNS) tissue of the subject with the rAAV; preferentially delivering the payload to the CNS tissue infected by the rAAV at a DNA enrichment of at least 100-fold greater than a wild type AAV9; and producing a therapeutic effect in the CNS tissue, thereby treating the condition.

[0037] In some aspects, the DNA enrichment is at least 200-fold greater than the wild type AAV9. In some aspects, the DNA enrichment is at least 1000-fold greater than the wild type AAV9.

[0038] In various aspects, the present disclosure provides a method of treating a condition in a subject, the method comprising: administering a recombinant adeno-associated virus (rAAV) to the subject, wherein the rAAV encapsidates a payload, and wherein the rAAV comprises a VP capsid polypeptide comprising a 581-589 region corresponding to residues 581 to 589 of a VP1 polypeptide, wherein the 581-589 region comprises at least one amino acid substitution as compared to SEQ ID NO: 9; infecting central nervous system (CNS) tissue of the subject with the rAAV; preferentially transcribing the payload to the CNS tissue infected by the rAAV at an RNA enrichment of at least 100-fold greater than a wild type AAV9; and producing a therapeutic effect in the CNS tissue, thereby treating the condition.

[0039] In some aspects, the DNA enrichment is at least 200-fold greater than the wild type AAV9. In some aspects, the DNA enrichment is at least 500-fold greater than the wild type AAV9.

[0040] In various aspects, the present disclosure provides a method of treating a condition in a subject, the method comprising: administering a recombinant adeno-associated virus (rAAV) to the subject, wherein the rAAV encapsidates a payload, and wherein the rAAV comprises a VP capsid polypeptide comprising a 581-589 region corresponding to residues 581 to 589 of a VP1 polypeptide, wherein the 581-589 region comprises at least one amino acid substitution as compared to SEQ ID NO: 9; infecting central nervous system (CNS) tissue of the subject with the rAAV; preferentially delivering the payload to the CNS tissue infected by the rAAV at a DNA enrichment of at least 5-fold greater than a wild type AAV5; and producing a therapeutic effect in the CNS tissue, thereby treating the condition.

[0041] In some aspects, the DNA enrichment is at least 10-fold greater than the wild type AAV5.

[0042] In various aspects, the present disclosure provides a method of treating a condition in a subject, the method comprising: administering a recombinant adeno-associated virus (rAAV) to the subject, wherein the rAAV encapsidates a payload, and wherein the rAAV comprises a VP capsid polypeptide comprising a 581-589 region corresponding to residues 581 to 589 of a VP1 polypeptide, wherein the 581-589 region comprises at least one amino acid substitution as compared to SEQ ID NO: 9; infecting a central nervous system (CNS) tissue of the subject with the rAAV; preferentially transcribing the payload to the CNS tissue infected by the rAAV at an RNA enrichment of at least 5-fold greater than a wild type AAV5; and producing a therapeutic effect in the CNS tissue, thereby treating the condition.

[0043] In some aspects, the DNA enrichment is at least 20-fold greater than the wild type AAV5.

[0044] In various aspects, the present disclosure provides a method of treating a condition in a subject, the method comprising: administering a recombinant adeno-associated virus (rAAV) to the subject, wherein the rAAV encapsidates a payload, and wherein the rAAV comprises a VP capsid polypeptide comprising a 581-589 region corresponding to residues 581 to 589 of a VP1 polypeptide, wherein the 581-589 region has a sequence that is at least 85% identical to: (a) SEQ ID NO: 18, (b) SEQ ID NO: 3472, (c) SEQ ID NO: 262, (d) SEQ ID NO: 3306, (e) SEQ ID NO: 2028, (f) SEQ ID NO: 2791, (g) SEQ ID NO: 424, (h) SEQ ID NO: 2536, (i) SEQ ID NO: 1971, (j) SEQ ID NO: 415, (k) SEQ ID NO: 3846, (l) SEQ ID NO: 3283, (m) SEQ ID NO: 1956, (n) SEQ ID NO: 3297, (o) SEQ ID NO: 4545, (p) SEQ ID NO: 2661, (q) SEQ ID NO: 1576, (r) SEQ ID NO: 425, (s) SEQ ID NO: 709, (t) SEQ ID NO: 2168, (u) SEQ ID NO: 54, (v) SEQ ID NO: 429, (w) SEQ ID NO: 708, (x) SEQ ID NO: 428, (y) SEQ ID NO: 4119, (z) SEQ ID NO: 3906, (aa) SEQ ID NO: 2456, (bb) SEQ ID NO: 2278, (cc) SEQ ID NO: 5006, or (dd) SEQ ID NO: 426; infecting a CNS tissue of the subject with the rAAV; delivering the payload to the CNS tissue infected by the rAAV; and producing a therapeutic effect in the CNS tissue, thereby treating the condition.

[0045] In various aspects, the present disclosure provides a method of treating a condition in a subject, the method comprising: administering a recombinant adeno-associated virus (rAAV) to the subject, wherein the rAAV encapsidates a payload, and wherein the rAAV comprises a VP capsid polypeptide a 581-589 region corresponding to residues 581 to 589 of a VP1 polypeptide, wherein the 581-589 region comprises at least one amino acid substitution as compared to residues 581 to 589 of SEQ ID NO: 1, and wherein the VP capsid polypeptide does not have the sequence of any of SEQ ID NO: 3, SEQ ID NO: 4, SEQ ID NO: 5, SEQ ID NO: 6, SEQ ID NO: 7, or SEQ ID NO: 8; infecting a CNS tissue of the subject with the rAAV with at least 3-fold higher CNS tissue tropism as compared to a wild type AAV5 capsid comprising a peptide of SEQ ID NO: 1; delivering the payload to the CNS tissue infected by the rAAV; and producing a therapeutic effect in the CNS tissue, thereby treating the condition.

[0046] In various aspects, the present disclosure provides a method of treating a condition in a subject, the method comprising: administering a recombinant adeno-associated virus (rAAV) to the subject, wherein the rAAV encapsidates a payload, and wherein the rAAV comprises a VP capsid polypeptide as described herein; infecting a CNS tissue of the subject with the rAAV; delivering the payload to the CNS tissue infected by the rAAV; and producing a therapeutic effect in the CNS tissue, thereby treating the condition.

[0047] In some aspects, the condition is a neurological condition. In some aspects, the neurological condition is an aromatic l-amino acid decarboxylase (AADC) deficiency, Alzheimer's disease, a tauopathy, a synucleinopathy, Batten disease, mucopolysaccharidosis type III, frontotemporal dementia, Parkinson's disease, corticobasal degeneration, progressive supranuclear palsy, chronic traumatic encephalopathy, Gaucher disease, Canavan disease, Tay-Sachs disease, Huntington's disease, Protocki-Lupski syndrome, amyotrophic lateral sclerosis, Down syndrome, Sanfilippo disease type A, Sanfilippo disease type B, or Rett syndrome. In some aspects, the condition is Rett syndrome. In some aspects, the payload encodes a guide RNA that targets an mRNA encoding by MECP2 or a tRNA that targets a premature stope codon in MECP2. In some aspects, the condition is Parkinson's disease. In some aspects, the payload encodes a guide RNA targeting an mRNA encoding LRRK2, GBA, α-synuclein, AADC, GDNF, Neurturin, GAD, FOXG1, Kᵥ7.2, fragile X mental retardation protein, tau, or laforin. In some aspects, the condition is Alzheimer's disease. In some aspects, the payload encodes a guide RNA targeting an mRNA encoding amyloid precursor protein (APP), alpha-synuclein (SNCA), Tau protein (MAPT), or Apolipoprotein E (ApoE). In some aspects, the payload encodes a transgene encoding amyloid precursor protein (APP), alpha-synuclein (SNCA), Tau protein (MAPT), or Apolipoprotein E (ApoE).

[0048] In some aspects, the method comprises administering from 1×10⁵ to 5×10¹⁴ rAAVs per kg subject weight. In some aspects, the method comprises infecting the CNS tissue with at least 2.5-fold, at least 3-fold, at least 3.5-fold, at least 4-fold, at least 5-fold, at least 10-fold, at least 20-fold, at least 50-fold, at least 75-fold, at least 100-fold, at least 200-fold, at least 500-fold, or at least 1000-fold higher tissue tropism than a wild type AAV5 capsid comprising a peptide of SEQ ID NO: 1.

[0049] In some aspects, the payload encodes a therapeutic protein, therapeutic polynucleotide, a guide RNA, a tRNA, a suppressor tRNA, a siRNA, a miRNA, an mRNA, a shRNA, a circular RNA, an antisense oligonucleotide (ASO), a ribozyme, a DNAzyme, an aptamer, or any combination thereof. In some aspects, the guide RNA is a CRISPR/Cas guide RNA or an ADAR guide RNA. In some aspects, the therapeutic protein is selected from the group consisting of aromatic l-amino acid decarboxylase (AADC), amyloid precursor protein (APP), α-synuclein, microtubule associated protein tau (MAPT), ApoE, nerve growth factor (NGF), telomerase reverse transcriptase (TERT), CLN2, CLN3, CLN6, N-acetyl-α-glucosaminidase (NAGLU), granulin, glucosylceramidase 8 (GBA), aspartoacylase, GDNF, neurturin (NTN), glutamate decarboxylase (GAD), FOXG1, Kᵥ7.2, laforin, leucine rich repeat kinase 2 (LRRK2), hexosaminidase A (HEXA), hexosaminidase B (HEXB), huntingtin, cholesterol 24-hydroxylase, C9orf72, superoxide dismutase 1 (SOD1), dual specificity tyrosine-phosphorylation-regulated kinase 1A (DYRKA1), N-sulfoglucosamine sulfohydrolase (SGSH), surfeit locus protein 1 (SURF1), GABA transporter 1 (GAT1), and methyl-CpG binding protein 2 (MECP2). In some aspects, the therapeutic polynucleotide targets an mRNA encoding a protein selected from the group consisting of aromatic l-amino acid decarboxylase (AADC), amyloid precursor protein (APP), α-synuclein, microtubule associated protein tau (MAPT), ApoE, nerve growth factor (NGF), telomerase reverse transcriptase (TERT), CLN2, CLN3, CLN6, N-acetyl-α-glucosaminidase (NAGLU), granulin, glucosylceramidase 8 (GBA), aspartoacylase, GDNF, neurturin (NTN), glutamate decarboxylase (GAD), FOXG1, Kᵥ7.2, laforin, leucine rich repeat kinase 2 (LRRK2), hexosaminidase A (HEXA), hexosaminidase B (HEXB), huntingtin, cholesterol 24-hydroxylase, C9orf72, superoxide dismutase 1 (SOD1), dual specificity tyrosine-phosphorylation-regulated kinase 1A (DYRKA1), N-sulfoglucosamine sulfohydrolase (SGSH), surfeit locus protein 1 (SURF1), GABA transporter 1 (GAT1), and methyl-CpG binding protein 2 (MECP2). In some aspects, the payload encodes a component of a CRISPR/Cas system, an adenosine deaminase acting on RNA (ADAR) enzyme, a transcriptional activator, or a transcriptional repressor. In some aspects, the component of the CRISPR/Cas system comprises a Cas3, a Cas8, a Cas10, a Cas9, a Cas4, a Cas12, a Cas13, a guide RNA, or a combination thereof. In some aspects, the ADAR enzyme is ADAR1 or ADAR2. In some aspects, the transcriptional activator is VP64. In some aspects, the transcriptional repressor is KRAB.

[0050] In some aspects, the method comprises systemically administering the rAAV to the subject. In some aspects, the method comprises administering the rAAV via intravenous administration, intramuscular administration, intraperitoneal administration, or oral administration. In some aspects, the method further comprises expressing a therapeutic polypeptide or a therapeutic polynucleotide encoded by the payload in the CNS tissue infected by the rAAV. In some aspects, the method comprises expressing the therapeutic polypeptide or the therapeutic polynucleotide with higher CNS tissue tropism compared to a wild type AAV5 capsid comprising a peptide of SEQ ID NO: 1. In some aspects, the method comprises expressing the therapeutic polypeptide or the therapeutic polynucleotide with at least 3-fold, at least 3.5-fold, at least 4-fold, at least 5-fold, at least 10-fold, at least 20-fold, at least 50-fold, at least 75-fold, at least 100-fold, at least 200-fold, at least 500-fold higher, or at least 1000-fold higher tropism compared to the wild type AAV5 capsid.

[0051] In some aspects, the method comprises producing a toxicity in the subject that is lower than a toxicity produced upon systemic administration of a comparable number of wild type AAV5 capsids comprising a VP capsid polypeptide of SEQ ID NO: 1. In some aspects, the method comprises producing a toxicity in the subject that is lower than a toxicity produced upon systemic administration of a number of wild type AAV5 capsids comprising a VP capsid polypeptide of SEQ ID NO: 1 sufficient to deliver a comparable number of payloads to the CNS tissue. In some aspects, the method comprises producing a concentration of neutralizing antibodies in the subject that is lower than a concentration of neutralizing antibodies produced upon systemic administration of a comparable number of wild type AAV5 capsids comprising a VP capsid polypeptide of SEQ ID NO: 1. In some aspects, the method comprises producing a concentration of neutralizing antibodies in the subject that is lower than a concentration of neutralizing antibodies produced upon intravitreal administration of a comparable number of wild type AAV2 capsids. In some aspects, the method comprises producing a concentration of neutralizing antibodies in the subject that is lower than a concentration of neutralizing antibodies produced upon intravitreal administration of a comparable number of wild type AAV8 capsids. In some aspects, the method comprises producing a concentration of neutralizing antibodies in the subject that is lower than a concentration of neutralizing antibodies produced upon intravitreal administration of a comparable number of wild type AAV9 capsids. In some aspects, the VP capsid polypeptide further comprises one or more mutations outside of the 581-589 region that contributes to reduced production of neutralizing antibodies relative to a wild type AAV capsid. In some aspects, the method comprises producing a concentration of neutralizing antibodies in the subject that is lower than a concentration of neutralizing antibodies produced upon systemic administration of a number of wild type AAV5 capsids comprising a VP capsid polypeptide of SEQ ID NO: 1 sufficient to deliver a comparable number of payloads to the CNS tissue.

[0052] In various aspects, the present disclosure provides a viral protein (VP) capsid polypeptide, wherein the VP capsid polypeptide comprises a 581-589 region corresponding to residues 581 to 589 a VP1 polypeptide, wherein the 581-589 region comprises at least one amino acid substitution as compared to SEQ ID NO: 9, and wherein a recombinant viral capsid comprising the VP capsid polypeptide is capable of preferentially targeting central nervous system tissue and a cardiac muscle tissue.

[0053] In some aspects, the 581-589 region has a sequence having at least 85% sequence identity to a sequence selected from the group consisting of SEQ ID NO: 18, SEQ ID NO: 2536, SEQ ID NO: 3846, SEQ ID NO: 4545, SEQ ID NO: 2661, SEQ ID NO: 1576, SEQ ID NO: 4317, SEQ ID NO: 23, SEQ ID NO: 22, SEQ ID NO: 964, SEQ ID NO: 4288, SEQ ID NO: 4338, SEQ ID NO: 5037, and SEQ ID NO: 4936. In some aspects, the 581-589 region has a sequence selected from the group consisting of SEQ ID NO: 18, SEQ ID NO: 2536, SEQ ID NO: 3846, SEQ ID NO: 4545, SEQ ID NO: 2661, SEQ ID NO: 1576, SEQ ID NO: 4317, SEQ ID NO: 23, SEQ ID NO: 22, SEQ ID NO: 964, SEQ ID NO: 4288, SEQ ID NO: 4338, SEQ ID NO: 5037, and SEQ ID NO: 4936.

[0054] In various aspects, the present disclosure provides a viral protein (VP) capsid polypeptide, wherein the VP capsid polypeptide comprises a 581-589 region corresponding to residues 581 to 589 a VP1 polypeptide, wherein the 581-589 region comprises at least one amino acid substitution as compared to SEQ ID NO: 9, and wherein a recombinant viral capsid comprising the VP capsid polypeptide is capable of preferentially targeting central nervous system tissue and a skeletal muscle tissue.

[0055] In some aspects, the 581-589 region has a sequence having at least 85% sequence identity to a sequence selected from the group consisting of SEQ ID NO: 18, SEQ ID NO: 3472, SEQ ID NO: 262, SEQ ID NO: 3306, SEQ ID NO: 2536, SEQ ID NO: 1971, SEQ ID NO: 3283, SEQ ID NO: 3297, SEQ ID NO: 4545, SEQ ID NO: 2661, SEQ ID NO: 307, SEQ ID NO: 4317, SEQ ID NO: 1268, SEQ ID NO: 4288, SEQ ID NO: 724, and SEQ ID NO: 5037. In some aspects, the 581-589 region has a sequence selected from the group consisting of SEQ ID NO: 18, SEQ ID NO: 3472, SEQ ID NO: 262, SEQ ID NO: 3306, SEQ ID NO: 2536, SEQ ID NO: 1971, SEQ ID NO: 3283, SEQ ID NO: 3297, SEQ ID NO: 4545, SEQ ID NO: 2661, SEQ ID NO: 307, SEQ ID NO: 4317, SEQ ID NO: 1268, SEQ ID NO: 4288, SEQ ID NO: 724, and SEQ ID NO: 5037.

[0056] In various aspects, the present disclosure provides a viral protein (VP) capsid polypeptide, wherein the VP capsid polypeptide comprises a 581-589 region corresponding to residues 581 to 589 a VP1 polypeptide, wherein the 581-589 region comprises at least one amino acid substitution as compared to SEQ ID NO: 9, and wherein a recombinant viral capsid comprising the VP capsid polypeptide is capable of preferentially targeting central nervous system tissue and a muscle tissue.

[0057] In some aspects, the 581-589 region has a sequence having at least 85% sequence identity to a sequence selected from the group consisting of SEQ ID NO: 18, SEQ ID NO: 3472, SEQ ID NO: 262, SEQ ID NO: 2536, SEQ ID NO: 3846, SEQ ID NO: 3297, SEQ ID NO: 4545, SEQ ID NO: 2661, SEQ ID NO: 1576, SEQ ID NO: 4317, SEQ ID NO: 23, SEQ ID NO: 22, SEQ ID NO: 964, SEQ ID NO: 4288, SEQ ID NO: 4290, SEQ ID NO: 4338, and SEQ ID NO: 5037. In some aspects, the 581-589 region has a sequence selected from the group consisting of SEQ ID NO: 18, SEQ ID NO: 3472, SEQ ID NO: 262, SEQ ID NO: 2536, SEQ ID NO: 3846, SEQ ID NO: 3297, SEQ ID NO: 4545, SEQ ID NO: 2661, SEQ ID NO: 1576, SEQ ID NO: 4317, SEQ ID NO: 23, SEQ ID NO: 22, SEQ ID NO: 964, SEQ ID NO: 4288, SEQ ID NO: 4290, SEQ ID NO: 4338, and SEQ ID NO: 5037.

[0058] In various aspects, the present disclosure provides a recombinant adeno-associated virus (rAAV) for use in a method of treating a condition in a subject, the method comprising: administering an rAAV to the subject, wherein the rAAV encapsidates a payload, and wherein the rAAV comprises a VP capsid polypeptide comprising a 581-589 region corresponding to residues 581 to 589 of a VP1 polypeptide, wherein the 581-589 region comprises at least one amino acid substitution as compared to SEQ ID NO: 9; infecting a central nervous system (CNS) tissue of the subject with the rAAV; and preferentially delivering the payload to the CNS tissue infected by the rAAV at a DNA enrichment of at least 100-fold greater than a wild type AAV9.

[0059] In various aspects, the present disclosure provides a recombinant adeno-associated virus (rAAV) for use in a method of treating a condition in a subject, the method comprising: administering an rAAV to the subject, wherein the rAAV encapsidates a payload, and wherein the rAAV comprises a VP capsid polypeptide comprising a 581-589 region corresponding to residues 581 to 589 of a VP1 polypeptide, wherein the 581-589 region comprises at least one amino acid substitution as compared to SEQ ID NO: 9; infecting central nervous system (CNS) tissue of the subject with the rAAV; and preferentially transcribing the payload to the CNS tissue infected by the rAAV at an RNA enrichment of at least 100-fold greater than a wild type AAV9.

[0060] In various aspects, the present disclosure provides a recombinant adeno-associated virus (rAAV) for use in a method of treating a condition in a subject, the method comprising: administering an rAAV to the subject, wherein the rAAV encapsidates a payload, and wherein the rAAV comprises a VP capsid polypeptide comprising a 581-589 region corresponding to residues 581 to 589 of a VP1 polypeptide, wherein the 581-589 region comprises at least one amino acid substitution as compared to SEQ ID NO: 9; infecting central nervous system (CNS) tissue of the subject with the rAAV; and preferentially delivering the payload to the CNS tissue infected by the rAAV at a DNA enrichment of at least 5-fold greater than a wild type AAV5.

[0061] In various aspects, the present disclosure provides a recombinant adeno-associated virus (rAAV) for use in a method of treating a condition in a subject, the method comprising: administering an rAAV to the subject, wherein the rAAV encapsidates a payload, and wherein the rAAV comprises a VP capsid polypeptide comprising a 581-589 region corresponding to residues 581 to 589 of a VP1 polypeptide, wherein the 581-589 region comprises at least one amino acid substitution as compared to SEQ ID NO: 9; infecting a central nervous system (CNS) tissue of the subject with the rAAV; and preferentially transcribing the payload to the CNS tissue infected by the rAAV at an RNA enrichment of at least 5-fold greater than a wild type AAV5.

[0062] In various aspects, the present disclosure provides a recombinant adeno-associated virus (rAAV) for use in a method of treating a condition in a subject, the method comprising: administering an rAAV to the subject, wherein the rAAV encapsidates a payload, and wherein the rAAV comprises a VP capsid polypeptide comprising a 581-589 region corresponding to residues 581 to 589 of a VP1 polypeptide, wherein the 581-589 region has a sequence that is at least 85% identical to: (a) SEQ ID NO: 18, (b) SEQ ID NO: 3472, (c) SEQ ID NO: 262, (d) SEQ ID NO: 3306, (e) SEQ ID NO: 2028, (f) SEQ ID NO: 2791, (g) SEQ ID NO: 424, (h) SEQ ID NO: 2536, (i) SEQ ID NO: 1971, (j) SEQ ID NO: 415, (k) SEQ ID NO: 3846, (l) SEQ ID NO: 3283, (m) SEQ ID NO: 1956, (n) SEQ ID NO: 3297, (o) SEQ ID NO: 4545, (p) SEQ ID NO: 2661, (q) SEQ ID NO: 1576, (r) SEQ ID NO: 425, (s) SEQ ID NO: 709, (t) SEQ ID NO: 2168, (u) SEQ ID NO: 54, (v) SEQ ID NO: 429, (w) SEQ ID NO: 708, (x) SEQ ID NO: 428, (y) SEQ ID NO: 4119, (z) SEQ ID NO: 3906, (aa) SEQ ID NO: 2456, (bb) SEQ ID NO: 2278, (cc) SEQ ID NO: 5006, or (dd) SEQ ID NO: 426; infecting a CNS tissue of the subject with the rAAV; and delivering the payload to the CNS tissue infected by the rAAV.

[0063] In various aspects, the present disclosure provides a recombinant adeno-associated virus (rAAV) for use in a method of treating a condition in a subject, the method comprising: administering an rAAV to the subject, wherein the rAAV encapsidates a payload, and herein the rAAV comprises a VP capsid polypeptide a 581-589 region corresponding to residues 581 to 589 of a VP1 polypeptide, wherein the 581-589 region comprises at least one amino acid substitution as compared to residues 581 to 589 of SEQ ID NO: 1, and wherein the VP capsid polypeptide does not have the sequence of any of SEQ ID NO: 3, SEQ ID NO: 4, SEQ ID NO: 5, SEQ ID NO: 6, SEQ ID NO: 7, or SEQ ID NO: 8; infecting a CNS tissue of the subject with the rAAV with at least 3-fold higher CNS tissue tropism as compared to a wild type AAV5 capsid comprising a peptide of SEQ ID NO: 1; and delivering the payload to the CNS tissue infected by the rAAV.

[0064] In various aspects, the present disclosure provides a recombinant adeno-associated virus (rAAV) for use in a method of treating a condition in a subject, the method comprising: administering an rAAV to the subject, wherein the rAAV encapsidates a payload, and wherein the rAAV comprises a VP capsid polypeptide as described herein; infecting a CNS tissue of the subject with the rAAV; and delivering the payload to the CNS tissue infected by the rAAV

[0065] In various aspects, the present disclosure provides a viral protein (VP) capsid polypeptide, wherein the VP capsid polypeptide comprises a 581-589 region corresponding to residues 581 to 589 a VP1 polypeptide, wherein the 581-589 region comprises at least one amino acid substitution as compared to SEQ ID NO: 9, and wherein a recombinant viral capsid comprising the VP capsid polypeptide is capable of preferentially targeting a cardiac muscle tissue at a DNA enrichment of at least 25-fold greater than a wild type AAV9.

[0066] In some aspects, the 581-589 region has a sequence selected from the group consisting of SEQ ID NO: 348, SEQ ID NO: 2536, SEQ ID NO: 1576, SEQ ID NO: 4955, SEQ ID NO: 5017, SEQ ID NO: 4349, SEQ ID NO: 4964, SEQ ID NO: 293, SEQ ID NO: 4314, SEQ ID NO: 4995, SEQ ID NO: 4366, SEQ ID NO: 4961, SEQ ID NO: 4952, SEQ ID NO: 5075, SEQ ID NO: 4354, SEQ ID NO: 5060, SEQ ID NO: 5138, SEQ ID NO: 5206, SEQ ID NO: 4288, SEQ ID NO: 5092, SEQ ID NO: 4059, SEQ ID NO: 4295, SEQ ID NO: 5030, SEQ ID NO: 4938, SEQ ID NO: 2661, SEQ ID NO: 5215, SEQ ID NO: 4960, SEQ ID NO: 4969, SEQ ID NO: 5023, SEQ ID NO: 4934, SEQ ID NO: 4545, SEQ ID NO: 4963, SEQ ID NO: 4363, SEQ ID NO: 5159, and SEQ ID NO: 4973.

[0067] In various aspects, the present disclosure provides a viral protein (VP) capsid polypeptide, wherein the VP capsid polypeptide comprises a 581-589 region corresponding to residues 581 to 589 of a VP1 polypeptide; wherein the 581-589 region has a sequence that is at least 85% identical to: (a) SEQ ID NO: 348, (b) SEQ ID NO: 2536, (c) SEQ ID NO: 1576, (d) SEQ ID NO: 4955, (e) SEQ ID NO: 5017, (f) SEQ ID NO: 4349, (g) SEQ ID NO: 4964, (h) SEQ ID NO: 293, (i) SEQ ID NO: 4314, (j) SEQ ID NO: 4995, (k) SEQ ID NO: 4366, (l) SEQ ID NO: 4961, (m) SEQ ID NO: 4952, (n) SEQ ID NO: 5075, (o) SEQ ID NO: 4354, (p) SEQ ID NO: 5060, (q) SEQ ID NO: 5138, (r) SEQ ID NO: 5206, (s) SEQ ID NO: 4288, (t) SEQ ID NO: 5092, (u) SEQ ID NO: 4059, (v) SEQ ID NO: 4295, (w) SEQ ID NO: 5030, (x) SEQ ID NO: 4938, (y) SEQ ID NO: 2661, (z) SEQ ID NO: 5215, (aa) SEQ ID NO: 4960, (bb) SEQ ID NO: 4969, (cc) SEQ ID NO: 5023, or (dd) SEQ ID NO: 4934.

[0068] In various aspects, the present disclosure provides a viral protein (VP) capsid polypeptide, wherein the VP capsid polypeptide comprises a 581-589 region corresponding to residues 581 to 589 a VP1 polypeptide, wherein the 581-589 region comprises at least one amino acid substitution as compared to SEQ ID NO: 9, and wherein a recombinant viral capsid comprising the VP capsid polypeptide is capable of preferentially targeting a skeletal muscle tissue at a DNA enrichment of at least 15-fold greater than a wild type AAV9.

[0069] In some aspects, the 581-589 region has a sequence selected from the group consisting of SEQ ID NO: 3472, SEQ ID NO: 3297, SEQ ID NO: 2661, SEQ ID NO: 4545, SEQ ID NO: 348, SEQ ID NO: 18, SEQ ID NO: 4349, SEQ ID NO: 293, SEQ ID NO: 5017, SEQ ID NO: 4955, SEQ ID NO: 4366, SEQ ID NO: 5092, SEQ ID NO: 210, SEQ ID NO: 4059, SEQ ID NO: 2536, SEQ ID NO: 5206, and SEQ ID NO: 1971.

[0070] In various aspects, the present disclosure provides a viral protein (VP) capsid polypeptide, wherein the VP capsid polypeptide comprises a 581-589 region corresponding to residues 581 to 589 of a VP1 polypeptide; wherein the 581-589 region has a sequence that is at least 85% identical to: (a) SEQ ID NO: 3472, (b) SEQ ID NO: 3297, (c) SEQ ID NO: 2661, (d) SEQ ID NO: 4545, (e) SEQ ID NO: 348, (f) SEQ ID NO: 18, (g) SEQ ID NO: 4349, (h) SEQ ID NO: 293, (i) SEQ ID NO: 5017, (j) SEQ ID NO: 4955, (k) SEQ ID NO: 4366, (l) SEQ ID NO: 5092, (m) SEQ ID NO: 210, (n) SEQ ID NO: 4059, (o) SEQ ID NO: 2536, (p) SEQ ID NO: 5206, (q) SEQ ID NO: 1971, (r) SEQ ID NO: 262, (s) SEQ ID NO: 4343, (t) SEQ ID NO: 4995, (u) SEQ ID NO: 4009, (v) SEQ ID NO: 5190, (w) SEQ ID NO: 724, (x) SEQ ID NO: 4288, (y) SEQ ID NO: 4973, (z) SEQ ID NO: 4314, (aa) SEQ ID NO: 1561, (bb) SEQ ID NO: 5147, (cc) SEQ ID NO: 4238, or (dd) SEQ ID NO: 4961.

[0071] In various aspects, the present disclosure provides a viral protein (VP) capsid polypeptide, wherein the VP capsid polypeptide comprises a 581-589 region corresponding to residues 581 to 589 a VP1 polypeptide, wherein the 581-589 region comprises at least one amino acid substitution as compared to SEQ ID NO: 9, and wherein a recombinant viral capsid comprising the VP capsid polypeptide is capable of preferentially targeting a muscle tissue at a DNA enrichment of at least 20-fold greater than a wild type AAV9.

[0072] In some aspects, the 581-589 region has a sequence selected from the group consisting of SEQ ID NO: 348, SEQ ID NO: 2536, SEQ ID NO: 4955, SEQ ID NO: 5017, SEQ ID NO: 4349, SEQ ID NO: 293, SEQ ID NO: 1576, SEQ ID NO: 2661, SEQ ID NO: 4964, SEQ ID NO: 4314, SEQ ID NO: 4995, SEQ ID NO: 4366, SEQ ID NO: 4545, SEQ ID NO: 4961, SEQ ID NO: 5206, SEQ ID NO: 5092, SEQ ID NO: 3472, SEQ ID NO: 5075, SEQ ID NO: 4059, SEQ ID NO: 4354, SEQ ID NO: 5060, SEQ ID NO: 4288, SEQ ID NO: 4952, SEQ ID NO: 5138, SEQ ID NO: 18, SEQ ID NO: 5030, SEQ ID NO: 3297, SEQ ID NO: 4295, SEQ ID NO: 4363, SEQ ID NO: 4963, SEQ ID NO: 4973, SEQ ID NO: 5159, SEQ ID NO: 4960, SEQ ID NO: 4938, SEQ ID NO: 5157, SEQ ID NO: 5023, and SEQ ID NO: 4969.

[0073] In various aspects, the present disclosure provides a viral protein (VP) capsid polypeptide, wherein the VP capsid polypeptide comprises a 581-589 region corresponding to residues 581 to 589 of a VP1 polypeptide; wherein the 581-589 region has a sequence that is at least 85% identical to: (a) SEQ ID NO: 348, (b) SEQ ID NO: 2536, (c) SEQ ID NO: 4955, (d) SEQ ID NO: 5017, (e) SEQ ID NO: 4349, (f) SEQ ID NO: 293, (g) SEQ ID NO: 1576, (h) SEQ ID NO: 2661, (i) SEQ ID NO: 4964, (j) SEQ ID NO: 4314, (k) SEQ ID NO: 4995, (l) SEQ ID NO: 4366, (m) SEQ ID NO: 4545, (n) SEQ ID NO: 4961, (o) SEQ ID NO: 5206, (p) SEQ ID NO: 5092, (q) SEQ ID NO: 3472, (r) SEQ ID NO: 5075, (s) SEQ ID NO: 4059, (t) SEQ ID NO: 4354, (u) SEQ ID NO: 5060, (v) SEQ ID NO: 4288, (w) SEQ ID NO: 4952, (x) SEQ ID NO: 5138, (y) SEQ ID NO: 18, (z) SEQ ID NO: 5030, (aa) SEQ ID NO: 3297, (bb) SEQ ID NO: 4295, (cc) SEQ ID NO: 4363, or (dd) SEQ ID NO: 4963.

[0074] In various aspects, the present disclosure provides a viral protein (VP) capsid polypeptide, wherein the VP capsid polypeptide comprises a 581-589 region corresponding to residues 581 to 589 of a VP1 polypeptide, wherein the 581-589 region comprises a sequence having at least 85% identity to any one of any one of SEQ ID NO: 4238-SEQ ID NO: 4933 or SEQ ID NO: 4934-SEQ ID NO: 5233.

[0075] In some aspects, the 581-589 region has a sequence of any one of any one of SEQ ID NO: 4238-SEQ ID NO: 4933 or SEQ ID NO: 4934-SEQ ID NO: 5233.

### INCORPORATION BY REFERENCE

[0076] All references cited herein are incorporated by reference to the same extent as if each individual publication, database entry (e.g., Genbank sequences or GeneID entries), patent application, or patent, was specifically and individually indicated incorporated by reference in its entirety, for all purposes. This statement of incorporation by reference is intended by Applicants, pursuant to 37 C.F.R. § 1.57(b)(1), to relate to each and every individual publication, database entry (e.g., Genbank sequences or GeneID entries), patent application, or patent, each of which is clearly identified in compliance with 37 C.F.R. § 1.57(b)(2), even if such citation is not immediately adjacent to a dedicated statement of incorporation by reference. The inclusion of dedicated statements of incorporation by reference, if any, within the specification does not in any way weaken this general statement of incorporation by reference. Citation of the references herein is not intended as an admission that the reference is pertinent prior art, nor does it constitute any admission as to the contents or date of these publications or documents.

### BRIEF DESCRIPTION OF THE DRAWINGS

[0077] These and other features, aspects, and advantages of the present invention will become better understood with regard to the following description, and accompanying drawings where:

[0078] FIG. 1 is a schematic of the high throughput AAV capsid engineering system.

[0079] FIG. 2A provides a side view (top panel) and top view (bottom panel) of key residues of known AAV capsids that have been shown to interact with target cells.

[0080] FIG. 2B illustrates salient features of the AAV capsid library described in EXAMPLE 1, showing the region of introduced diversity, with residue numbering corresponding to the numbering of amino acids in AAV5 VP1.

[0081] FIG. 3A shows a next generation sequencing (NGS) analysis of purified secondary screen library virus containing engineered AAV5 variants of the present disclosure and barcoded control serotypes (AAV1, AAV2, AAV5, AAV9, or AAV PHP.B) spiked in at 1×, 10×, and 100× stoichiometric ratios.

[0082] FIG. 3B is a schematic highlighting identification of AAV spike-in control DNA in CNS, liver, heart, and skeletal muscle by NGS analysis of NHP tissues post-selection.

[0083] FIG. 3C demonstrates that DNA from 94% of capsid variants predicted to target the CNS were found in the CNS.

[0084] FIG. 3D shows a comparison of DNA abundance in the CNS for three engineered AAV5 variants, SEQ ID NO: 18 (AAGRFNYFG), SEQ ID NO: 54 (AEDYWDLGA), and SEQ ID NO: 2028 (MDDICEFYA), of the present disclosure compared with wild type AAV5 and AAV9 spike-ins shows much greater infection than the highest (100×) controls.

[0085] FIG. 3E shows that engineered AAV5 variants of the present disclosure exhibit decreased liver infection compared to wild type (parental) AAV5 control.

[0086] FIG. 4 is a bar graph showing relative accumulation, expressed as log 10 fold change in brain accumulation relative to other tissues, of variant AAV capsids comprising 581-589 regions of SEQ ID NO: 415 (DARVYRALD), SEQ ID NO: 569 (DSASPIMGM), SEQ ID NO: 428 (DAWQMLSGN), SEQ ID NO: 430 (DAWSYQCYH), SEQ ID NO: 708 (EAWMYHQFH), SEQ ID NO: 3906 (YSGVRVTGY), SEQ ID NO: 709 (EAWSKLEQP), SEQ ID NO: 3297 (TAGRFNYFD), SEQ ID NO: 1956 (LVGWTLQHV), SEQ ID NO: 885 (ESWMKLEWQ), SEQ ID NO: 3283 (TAAFAYKYE), SEQ ID NO: 3472 (TSHYITFTP), SEQ ID NO: 426 (DAWMMMWGS), SEQ ID NO: 3306 (TANVYRSGQ), SEQ ID NO: 1971 (LWGWTLQHQ), SEQ ID NO: 425 (DAWLQLKDN), SEQ ID NO: 262 (CATRFNIGG), SEQ ID NO: 424 (DAWCFISSY), SEQ ID NO: 18 (AAGRFNYFG), SEQ ID NO: 54 (AEDYWDLGA), or SEQ ID NO: 2028 (MDDICEFYA). Accumulation was compared to wild type AAV capsids of AAV9, AAV1, AAV PHP.B, AAV2, and AAV5.

[0087] FIG. 5 is a bar graph showing relative accumulation, expressed as log 2 fold change in muscle accumulation relative to other tissues, of variant AAV capsids comprising 581-589 regions of SEQ ID NO: 4318 (CKEWYVRDR), SEQ ID NO: 4960 (CWREFSFQN), SEQ ID NO: 4371 (CVSLHSISM), SEQ ID NO: 3975 (QAHHYNILN), SEQ ID NO: 5215 (CVRTLQSPD), SEQ ID NO: 4598 (LAWSQLLTP), SEQ ID NO: 4359 (CVATKSRML), SEQ ID NO: 5665 (RQTTYDCLD), SEQ ID NO: 257 (CAHYAQWGK), SEQ ID NO: 344 (CSSGFHLFH), SEQ ID NO: 5607 (QCGFIRLNE), SEQ ID NO: 3528 (TVTHMSQHC), SEQ ID NO: 5155 (CVIWYHKYE), SEQ ID NO: 5363 (GCMCIRHAY), SEQ ID NO: 4633 (MACWKNATE), SEQ ID NO: 2525 (QAGSSFHQA), SEQ ID NO: 386 (CYQFWSQYS), SEQ ID NO: 4970 (CINFEIKLG), SEQ ID NO: 5143 (CWRHNIISP), SEQ ID NO: 5178 (CIKWVDIFP), SEQ ID NO: 2505 (PTQFYGPAF), SEQ ID NO: 3709 (VSASFQQHV), SEQ ID NO: 5056 (CVLNYFQFG), SEQ ID NO: 5017 (CFYKIQHKG), SEQ ID NO: 5040 (CVLRMGTFC), SEQ ID NO: 5161 (CTHMMGKSP), SEQ ID NO: 1128 (GFANFMMNF), SEQ ID NO: 2204 (MTMTATTFG), SEQ ID NO: 4316 (CIRHAQDCY), SEQ ID NO: 5463 (KISPWDGFY), SEQ ID NO: 4944 (CWKWQMMFG), SEQ ID NO: 4955 (CVWSQILGG), SEQ ID NO: 4952 (CVILSTRDK), SEQ ID NO: 3260 (SVSPCFCNS), SEQ ID NO: 384 (CYMPFKMQH), SEQ ID NO: 5038 (CVVWPVLGQ), SEQ ID NO: 2371 (NMTMAHQAS), SEQ ID NO: 289 (CIHSVHFAA), SEQ ID NO: 2985 (RVDAFNRGT), SEQ ID NO: 4508 (GSCLKIAQE), SEQ ID NO: 4292 (CAMLLQAVQ), SEQ ID NO: 4995 (CVGYRVHSP), SEQ ID NO: 4949 (CYHQVFSQG), SEQ ID NO: 5077 (CVGSQLHAM), SEQ ID NO: 2370 (NMNTFGKMN), SEQ ID NO: 5193 (CWSHLYFQT), SEQ ID NO: 4568 (KANEDLKQF), SEQ ID NO: 5206 (CFFYPMSMS), SEQ ID NO: 4215 (LYAFYMSSE), SEQ ID NO: 4841 (SSDQYEEMN), SEQ ID NO: 5092 (CISNYLKQG), SEQ ID NO: 4335 (CPMKHIQDR), SEQ ID NO: 5029 (CSFNIHKHT), SEQ ID NO: 3258 (SVRMFDAQY), SEQ ID NO: 4349 (CSSYLVTAN), SEQ ID NO: 348 (CTASWMSWD), or SEQ ID NO: 2729 (QQQQTNFQN). AAV variants that were generated using machine learning (ML) are denoted with arrows. Accumulation was compared to wild type AAV capsids of AAV9, AAV PHP.B, AAV1, AAV2, and AAV5.

[0088] FIG. 6 is a Circos plot depicting variant AAV5 capsids identified in a primary screen performed as illustrated in FIG. 1. Venn diagrams in the figure are not to scale. Over 1 million variant capsids were identified as unique to cardiac tissue, over 100,000 variants were identified as unique to skeletal muscle tissue, and over 1,000 variants were identified as shared between cardiac tissue and skeletal muscle tissue. The variants identified in cardiac tissue, skeletal muscle tissue, or both cardiac and skeletal muscle tissue exhibited low shared identity with liver (about 0.7% overlap) and other tissues (e.g., non-muscle tissues).

[0089] FIG. 7A illustrates the normalized counts of plasmid library DNA compared to assembled virus DNA for wild type AAV controls (textured points) and for variant AAV candidates (gray circles). Levels of assembled virus for variant AAV candidates were comparable to wild type AAV controls at 1× spike-in frequency.

[0090] FIG. 7B shows DNA levels in liver versus CNS for variant AAV candidates (gray circles), wild type controls (textured points), and select AAV candidates with CNS tropism (open circles). Circle size for the select AAV candidates corresponds to amount of functional transduction in CNS tissue, with larger circles representing higher RNA expression in CNS tissue. CNS-tropic AAV candidates were enriched in CNS tissue relative to liver tissue.

[0091] FIG. 7C shows DNA levels in muscle versus CNS for variant AAV candidates (gray circles), wild type controls (textured points), and select AAV candidates with CNS tropism (open circles). Circle size for the select AAV candidates corresponds to amount of functional transduction in CNS tissue, with larger circles representing higher RNA expression in CNS tissue. CNS-tropic AAV candidates were enriched in CNS tissue relative to muscle tissue.

[0092] FIG. 8A shows a bar graph of the proportion of candidates from different library sub-sets that were identified as muscle-specific in a secondary screen. Muscle candidates generated using machine learning (“Muscle ML Synthetic”) contained a higher proportion of muscle-specific sequences than candidates identified in muscle in a primary screen (“Muscle Observed”), CNS targeted sequences, or negative control sequences. Muscle candidate sequences generated using machine learning were five times more likely to be heart- and/or skeletal muscle-specific than muscle candidates identified in the primary screen and were 20 times more likely to be heart- and/or skeletal muscle-specific than CNS targeted variants. Candidates were classified as muscle-specific if they were >2-fold enriched in heart and/or skeletal muscle relative to all other tissues and viral input (FDR <0.1, permutations with α-RRA to account for consistency across multiple barcodes for each capsid).

[0093] FIG. 8B shows violin and box and whisker plots comparing the predicted probability of muscle specificity from primary screen for candidates that were (“yes”) or were not (“no”) identified as muscle-specific in the secondary screen. Candidates were classified as muscle-specific if they were >2-fold enriched in heart and/or skeletal muscle relative to all other tissues and viral input (FDR <0.1, permutations with α-RRA to account for consistency across multiple barcodes for each capsid).

[0094] FIG. 9 shows the CNS prediction score for CNS targeted candidates identified from multiple non-human primates (NHPs), multiple samples, observational enrichment, frequency enrichment, or sequence similarity, or generated by machine learning. CNS targeted candidates generated using machine learning had, on average, higher CNS prediction scores than candidates identified from other sources.

[0095] FIG. 10 is a plot showing relative accumulation and functional transduction of wild type AAV9 capsids at varying concentrations (top) and three identified CNS tissue-tropic AAV variants (SEQ ID NO: 18, SEQ ID NO: 424, and SEQ ID NO: 2028, bottom) in different tissues following systemic administration. RNA expression, representing functional transduction in each tissue, is shown on the x-axis. Circle size represents relative accumulation of AAV virions in each tissue, as measured by DNA. The AAV variants are highly selective for CNS tissue.

[0096] FIG. 11 is a plot showing relative accumulation and functional transduction of three identified CNS tissue-tropic AAV variants (SEQ ID NO: 18, SEQ ID NO: 424, and SEQ ID NO: 2028) in different CNS tissues following systemic administration. DNA quantification of a given AAV variant is shown on the x-axis. Circle size corresponds to amount of functional transduction of a given AAV variant in each tissue, with larger circles representing higher RNA expression in CNS tissue. The AAV variants show broad functional transduction in CNS tissues.

[0097] FIG. 12 illustrates the relative functional transduction of RNA expression in different regions of the brain of wild type AAV9 (left) and a CNS tissue-tropic AAV variant of SEQ ID NO: 2028 (right). Brain regions sampled include cortex (forebrain), cortex (occipital), cortex (temporal), thalamus, hypothalamus, hippocampus, cerebellum, caudate, putamen, pons, medulla, midbrain, and substantia nigra. Darker shading indicates higher transduction, as measured by RNA expression. The AAV variant shows broad functional transduction in CNS tissues.

[0098] FIG. 13 shows that three AAV variants of the present disclosure (SEQ ID NO: 18, SEQ ID NO: 424, and SEQ ID NO: 2028, also shown in FIG. 11) functionally transduce neurons. CAG promoter-driven RNA expression highlights functional transduction of any cell type while SYN promoter-driven RNA expression highlights functional transduction of neurons.

[0099] FIG. 14 shows that some AAV variants of the present disclosure that target CNS also demonstrate dorsal root ganglion (DRG) depletion.

[0100] FIG. 15 shows that promoter usage differentiates CNS AAV variants and heart muscle AAV variants. For example, certain AAV CNS variants of the present disclosure show CAG and SYN promoter-driven RNA expression, while certain AAV heart muscle variants show only CAG promoter-driven RNA expression.

[0101] FIG. 16A is bar plot of group intersection size for capsids enriched in cardiac muscle tissue in non-human primates (NHPs), mice, or both NHPs and mice.

[0102] FIG. 16B is a scatter plot showing log 2-fold change in enrichment in cardiac tissue in NHPs versus mice for capsid variants or wild type AAV capsids. Seventeen variants enriched in cardiac tissue in both NHPs and mice are shown in dark circles.

[0103] FIG. 17A is bar plot of group intersection size for capsids enriched in CNS tissue in non-human primates (NHPs) or mice.

[0104] FIG. 17B is a scatter plot showing log 2-fold change in enrichment in CNS tissue in NHPs versus mice for capsid variants or wild type AAV capsids.

[0105] FIG. 18 is a scatter plot of the average Z-score of CNS tissue enrichment for screened variant AAV capsids, ordered by average variant capsid rank for twelve methods of differential expression analysis. The high scoring variant capsid, corresponding to the outlined points in the upper left quadrant, were ranked consistently highly across multiple analysis strategies and ranked consistently higher than wild type AAV5 (wtAAV5) and wild type AAV9 (wtAAV9).

### DETAILED DESCRIPTION OF THE INVENTION

[0106] Unless described otherwise, all technical and scientific terms used herein have the meaning commonly understood by one of ordinary skill in the art to which the invention pertains.

[0107] Unless otherwise stated, whenever a range is recited, the range is inclusive of the recited endpoints. For example, the region from amino acid residue 581 to amino acid residue 589 of SEQ ID NO: 1 includes amino acid residues 581 and 589.

[0108] “Homology” or “identity” or “similarity” can refer to sequence similarity between two peptides or between two nucleic acid molecules. Homology can be determined by comparing a position in each sequence which can be aligned for purposes of comparison. When a position in the compared sequence can be occupied by the same base or amino acid, then the molecules can be homologous at that position. A degree of homology between sequences can be a function of the number of matching or homologous positions shared by the sequences. An “unrelated” or “non-homologous” sequence shares less than 40% identity, or alternatively less than 25% identity, with one of the sequences of the disclosure. Sequence homology can refer to a % identity of a sequence to a reference sequence. As a practical matter, whether any particular sequence can be at least 50%, 60%, 70%, 77.7%, 80%, 85%, 88.8%, 90%, 92%, 95%, 96%, 97%, 98% or 99% identical to any sequence described herein (which can correspond with a particular nucleic acid or amino acid sequence described herein), such particular polypeptide sequence can be determined conventionally using known computer programs such the Bestfit program (Wisconsin Sequence Analysis Package, Version 8 for Unix, Genetics Computer Group, University Research Park, 575 Science Drive, Madison, Wis. 53711). When using Bestfit or any other sequence alignment program to determine whether a particular sequence is, for instance, 95% identical to a reference sequence, the parameters can be set such that the percentage of identity can be calculated over the full length of the reference sequence and that gaps in sequence homology of up to 5% of the total reference sequence can be allowed. The term percent “identity” or percent “homology,” in the context of two or more nucleic acid or polypeptide sequences, refer to two or more sequences or subsequences that have a specified percentage of nucleotides or amino acid residues that are the same, when compared and aligned for maximum correspondence, as measured using one of the sequence comparison algorithms described below (e.g., BLASTP and BLASTN or other algorithms available to persons of skill) or by visual inspection. Depending on the application, the percent “identity” can exist over a region of the sequence being compared, e.g., over a functional domain, or, alternatively, exist over the full length of the two sequences to be compared. For sequence comparison, typically one sequence acts as a reference sequence to which test sequences are compared. When using a sequence comparison algorithm, test and reference sequences are input into a computer, subsequence coordinates are designated, if necessary, and sequence algorithm program parameters are designated. The sequence comparison algorithm then calculates the percent sequence identity for the test sequence(s) relative to the reference sequence, based on the designated program parameters. For purposes herein, determination of percent identity and sequence similarity is performed using the BLAST algorithm, which is described in Altschul et al., J. Mol. Biol. 215:403-410 (1990). Software for performing BLAST analyses is publicly available through the National Center for Biotechnology Information (www.ncbi.nlm.nih.gov/). For example, where an amino acid sequence consisting of 9 residues is compared with another 9 residue amino acid sequence, if 8 residues match then the sequences have 88.8% identity, if 7 residues match then the sequences have 77.7% identity.

[0109] In some cases, the identity between a reference sequence (query sequence, e.g., a sequence of the disclosure) and a subject sequence, also referred to as a global sequence alignment, can be determined using the FASTDB computer program. In some embodiments, parameters for a particular embodiment in which identity can be narrowly construed, used in a FASTDB amino acid alignment, can include: Scoring Scheme=PAM (Percent Accepted Mutations) 0, k-tuple=2, Mismatch Penalty=1, Joining Penalty=20, Randomization Group Length=0, Cutoff Score=1, Window Size=sequence length, Gap Penalty=5, Gap Size Penalty=0.05, Window Size=500 or the length of the subject sequence, whichever can be shorter. According to this embodiment, if the subject sequence can be shorter than the query sequence due to N- or C-terminal deletions, not because of internal deletions, a manual correction can be made to the results to take into consideration the fact that the FASTDB program does not account for N- and C-terminal truncations of the subject sequence when calculating global percent identity. For subject sequences truncated at the N- and C-termini, relative to the query sequence, the percent identity can be corrected by calculating the number of residues of the query sequence that can be lateral to the N- and C-terminal of the subject sequence, which can be not matched/aligned with a corresponding subject residue, as a percent of the total bases of the query sequence. A determination of whether a residue can be matched/aligned can be determined by results of the FASTDB sequence alignment. This percentage can be then subtracted from the percent identity, calculated by the FASTDB program using the specified parameters, to arrive at a final percent identity score. This final percent identity score can be used for the purposes of this embodiment. In some cases, only residues to the N- and C-termini of the subject sequence, which can be not matched/aligned with the query sequence, can be considered for the purposes of manually adjusting the percent identity score. That is, only query residue positions outside the farthest N- and C-terminal residues of the subject sequence can be considered for this manual correction. For example, a 90-residue subject sequence can be aligned with a 100-residue query sequence to determine percent identity. The deletion occurs at the N-terminus of the subject sequence, and therefore, the FASTDB alignment does not show a matching/alignment of the first 10 residues at the N-terminus. The 10 unpaired residues represent 10% of the sequence (number of residues at the N- and C-termini not matched/total number of residues in the query sequence) so 10% can be subtracted from the percent identity score calculated by the FASTDB program. If the remaining 90 residues were perfectly matched, the final percent identity can be 90%. In another example, a 90-residue subject sequence can be compared with a 100-residue query sequence. This time the deletions can be internal deletions, so there can be no residues at the N- or C-termini of the subject sequence which can be not matched/aligned with the query. In this case, the percent identity calculated by FASTDB can be not manually corrected. Once again, only residue positions outside the N- and C-terminal ends of the subject sequence, as displayed in the FASTDB alignment, which can be not matched/aligned with the query sequence can be manually corrected for.

[0110] Peptide sequences for use in the present invention may include one or more conservative amino acid substitutions, such that the resulting sequence has a similar amino acid sequence and/or retains the same function. The skilled person is aware that various amino acids have similar biochemical properties and thus are “conservative”. One or more such amino acids of a protein, polypeptide or peptide can often be substituted by one or more other such amino acids without eliminating a desired activity of that protein, polypeptide or peptide. Thus, the amino acids glycine, alanine, valine, leucine, and isoleucine can often be substituted for one another (amino acids having aliphatic side chains). Of these possible substitutions it is preferred that glycine and alanine are used to substitute for one another (since they have relatively short side chains) and that valine, leucine and isoleucine are used to substitute for one another (since they have larger aliphatic side chains which are hydrophobic). Other amino acids which can often be substituted for one another include: phenylalanine, tyrosine and tryptophan (amino acids having aromatic side chains); lysine, arginine and histidine (amino acids having basic side chains); aspartate and glutamate (amino acids having acidic side chains); asparagine and glutamine (amino acids having amide side chains); and cysteine and methionine (amino acids having sulfur containing side chains). It should be appreciated that amino acid substitutions within the scope of the present invention can be made using naturally occurring or non-naturally occurring amino acids. For example, the methyl group on an alanine may be replaced with an ethyl group, and/or minor changes may be made to the peptide backbone. Whether or not natural or synthetic amino acids are used, it is preferred that only L-amino acids are present. Substitutions of this nature are often referred to as “conservative substitutions”.

[0111] As used herein, “tropism” of a rAAV for a tissue may refer to the ability of a given rAAV to preferentially infect a given cell type or tissue. A degree of tropism may be determined by a ratio of an infection rate in a targeted tissue to an infection rate in a different, non-targeted tissue. As used herein, increased tropism for a given cell type or tissue, such as increased tropism conferred by a 581-589 region, is determined relative to a wild type AAV5 capsid. As used herein, “detargeting” of a rAAV to a tissue may refer to the ability of a given rAAV to avoid infecting a detargeted tissue or cell type while infecting one or more other tissues or cell types. A degree of detargeting may be determined by a ratio of an infection rate in a detargeted tissue to an infection rate of a different, non-detargeted tissue. As used herein, increased detargeting for a given cell type or tissue, such as increased detargeting conferred by a 581-589 region, is determined relative to a wild type AAV5 capsid.

[0112] As used herein, “tissue tropism” refers to a preference of a virus having an engineered VP capsid polypeptide of the present disclosure to infect a given tissue or be enriched in or accumulate in a given tissue. A “tissue-tropic” rAAV may specifically target or infect a first tissue or set of tissues and may not target or infect a second tissue or set of tissues. For example, a “CNS-tropic” rAAV may specifically target or infect CNS tissue and may not target or infect muscle, skin, bone, or other tissue or tissues. A “tissue-detargeted” rAAV may specifically avoid targeting or avoid infection of the detargeted tissue or set of tissues while infecting a second tissue or set of tissues. For example, a “liver-detargeted” rAAV may not target or infect liver tissue but may infect one or more other tissues, such as nervous, muscle, skin, bone, and/or other tissue. Tissue tropism or tissue detargeting, when used as a relative term and depending on the context in which it is described herein, refers to an increase or decrease in tissue tropism of a given rAAV virion having a first capsid polypeptide in a first tissue as compared to a second tissue and/or refers to an increase or decrease in tissue tropism of a given rAAV virion having a first capsid polypeptide to an rAAV virion having a second capsid polypeptide. In some embodiments, the first tissue can be a group of tissues. In some embodiments, the second tissue can be a group of tissues. For example, the first tissue may be CNS tissues, which comprise cortex forebrain, cortex occipital, cortex temporal, thalamus, hypothalamus, substantia nigra, hippocampus DG, hippocampus CA1, hippocampus CA3, and cerebellum and the second tissue may be a non-CNS tissue consisting collectively of liver, skeletal muscle, heart, lung, spleen, lymph node, bone marrow, mammary gland, skin, adrenal gland, thyroid, colon, sciatic nerve, and spinal cord tissues. As another example, the first tissue may be liver tissue and the second tissue may be non-liver tissue consisting collectively of CNS tissues, skeletal muscle, heart, lung, spleen, lymph node, bone marrow, mammary gland, skin, adrenal gland, thyroid, colon, sciatic nerve, and spinal cord tissues.

[0113] In some embodiments, the rAAV virions of the present disclosure may also be referred to as preferentially targeting a given tissue or having tissue selectivity for a given tissue. For example, an rAAV virion that preferentially targets CNS tissue may specifically target or infect CNS tissue and may not target or infect skeletal muscle, cardiac muscle, or other tissues or may target other tissues to a lesser degree than CNS tissue. As another example, an rAAV virion that has retinal tissue selectivity may specifically target or infect CNS tissue and may not target or infect skeletal muscle, cardiac muscle, or other tissues or may target other tissues to a lesser degree than CNS tissue.

[0114] For simplicity throughout this disclosure, viral capsid protein is generally referred to as “VP.” Viral capsid protein is referred to as VP1 when referencing AAV5 VP1 positional notation. In all cases, viral capsid sequences and mutations disclosed herein should be understood as pertaining to all isoforms of the capsid protein (VP1, VP2, and VP3), as a mixture of these isoforms assemble to form virions. The positional amino acid residue designations “581 to 589” are relative to the translational start of the VP1 polypeptide and should be adjusted accordingly to the relative start sites of VP2 and VP3. It should be understood that the present disclosure, when describing any particular VP1 sequence with mutations at particular amino acid residue positions, necessarily also encompasses corresponding mutations in VP2 and VP3. For example, any consensus sequence or specific sequence of a VP1 capsid protein having one or more mutations in the 581-589 region, corresponding to amino acid residues 581 to 589 of VP1, also encompasses VP2 and VP3 capsid proteins having said one or more mutations in an amino acid residue region in VP2 and VP3 corresponding to the amino acid residues of the VP1 581 to 589 region. For example, the amino acid residues of the 581 to 589 region of VP1 (SEQ ID NO: 1; MSFVDHPPDWLEEVGEGLREFLGLEAGPPKPKPNQQHQDQARGLVLPGYNYLGPGNG LDRGEPVNRADEVAREHDISYNEQLEAGDNPYLKYNHADAEFQEKLADDTSFGGNLG KAVFQAKKRVLEPFGLVEEGAKTAPTGKRIDDHFPKRKKARTEEDSKPST SSDAEAGPS GSQQLQIPAQPASSLGADTMSAGGGGPLGDNNQGADGVGNASGDWHCDSTWMGDRV VTKSTRTWVLPSYNNHQYREIKSGSVDGSNANAYFGYSTPWGYFDFNRFHSHWSPRD WQRLINNYWGFRPRSLRVKIFNIQVKEVTVQDSTTTIANNLTSTVQVFTDDDYQLPYVV GNGTEGCLPAFPPQVFTLPQYGYATLNRDNTENPTERSSFFCLEYFPSKMLRTGNNFEFT YNFEEVPFHSSFAPSQNLFKLANPLVDQYLYRFVSTNNTGGVQFNKNLAGRYANTYKN WFPGPMGRTQGWNLGSGVNRASVSAFATTNRMELEGASYQVPPQPNGMTNNLQGSN TYALENTMIFNSQPANPGTTATYLEGNMLITSESETQPVNRVAYNVGGQMATNNQSST TAPATGTYNLQEIVPGSVWMERDVYLQGPIWAKIPETGAHFHPSPAMGGFGLKHPPPM MLIKNTPVPGNIT SFSDVPVSSFITQYSTGQVTVEMEWELKKENSKRWNPEIQYTNNYN DPQFVDFAPDSTGEYRTTRPIGTRYLTRPL) correspond to the amino acid residues of the 445 to 453 region of VP2 (SEQ ID NO: 10; TAPTGKRIDDHFPKRKKARTEEDSKPSTSSDAEAGPSGSQQLQIPAQPASSLGADTMSAG GGGPLGDNNQGADGVGNASGDWHCDSTWMGDRVVTKSTRTWVLPSYNNHQYREIKS GSVDGSNANAYFGYSTPWGYFDFNRFHSHWSPRDWQRLINNYWGFRPRSLRVKIFNIQ VKEVTVQDSTTTIANNLTSTVQVFTDDDYQLPYVVGNGTEGCLPAFPPQVFTLPQYGY ATLNRDNTENPTERSSFFCLEYFPSKMLRTGNNFEFTYNFEEVPFHSSFAPSQNLFKLAN PLVDQYLYRFVSTNNTGGVQFNKNLAGRYANTYKNWFPGPMGRTQGWNLGSGVNRA SVSAFATTNRMELEGASYQVPPQPNGMTNNLQGSNTYALENTMIFNSQPANPGTTATY LEGNMLITSESETQPVNRVAYNVGGQMATNNQSSTTAPATGTYNLQEIVPGSVWMERD VYLQGPIWAKIPETGAHFHPSPAMGGFGLKHPPPMMLIKNTPVPGNITSFSDVPVSSFITQ YSTGQVTVEMEWELKKENSKRWNPEIQYTNNYNDPQFVDFAPDSTGEYRTTRPIGTRY LTRPL) and to the amino acid residues of 389 to 397 region of VP3 (SEQ ID NO: 11; MSAGGGGPLGDNNQGADGVGNASGDWHCDSTWMGDRVVTKSTRTWVLPSYNNHQY REIKSGSVDGSNANAYFGYSTPWGYFDFNRFHSHWSPRDWQRLINNYWGFRPRSLRVK IFNIQVKEVTVQDSTTTIANNLTSTVQVFTDDDYQLPYVVGNGTEGCLPAFPPQVFTLPQ YGYATLNRDNTENPTERSSFFCLEYFPSKMLRTGNNFEFTYNFEEVPFHSSFAPSQNLFK LANPLVDQYLYRFVSTNNTGGVQFNKNLAGRYANTYKNWFPGPMGRTQGWNLGSGV NRASVSAFATTNRMELEGASYQVPPQPNGMTNNLQGSNTYALENTMIFNSQPANPGTT ATYLEGNMLITSESETQPVNRVAYNVGGQMATNNQSSTTAPATGTYNLQEIVPGSVWM ERDVYLQGPIWAKIPETGAHFHPPSPAMGGFGLKHPPPMMLIKNTPVPGNITSFSDVPVSS FITQYSTGQVTVEMEWELKKENSKRWNPEIQYTNNYNDPQFVDFAPDSTGEYRTTRPIG TRYLTRPL). As used herein, “wild type AAV5” or “wild type AAV5 capsid polypeptide” refers to a VP1 capsid polypeptide of SEQ ID NO: 1, a VP2 capsid polypeptide of SEQ ID NO: 10, a VP3 capsid polypeptide of SEQ ID NO: 11, or a combination thereof. Also as used herein, a “wild type 581-589 region” refers to a 581 to 589 region of VP1 having a sequence of

(SEQ ID NO: 9)
ATGTYNLQE.

[0115] As used herein, “581-589 region” refers to a region or fragment of VP1 corresponding to amino acid residues 581 to 589 relative to the translational start of the VP1 polypeptide. The 581-589 region may also be referred to as a “variant region.” The 581-589 region corresponds to amino acid residues 445 to 453 of VP2 and to amino acid residues 389 to 397 of VP3. The 581-589 region may confer tissue tropism to an AAV, and defined variants (e.g., SEQ ID NO: 12-SEQ ID NO: 3937, SEQ ID NO: 3938-SEQ ID NO: 4237, SEQ ID NO: 4238-SEQ ID NO: 4933, SEQ ID NO: 4934-SEQ ID NO: 5233, SEQ ID NO: 5234-SEQ ID NO: 5807, or SEQ ID NO: 5808-SEQ ID NO: 5811) may be engineered to confer tissue tropism to an rAAV formed from viral capsid polypeptides (VP1, VP2, and VP3) comprising the 581-589 region. The VP1 with a generalized 581-589 region is provided in SEQ ID NO: 2 (MSFVDHPPDWLEEVGEGLREFLGLEAGPPKPKPNQQHQDQARGLVLPGYNYLGPGNG LDRGEPVNRADEVAREHDISYNEQLEAGDNPYLKYNHADAEFQEKLADDTSFGGNLG KAVFQAKKRVLEPFGLVEEGAKTAPTGKRIDDHFPKRKKARTEEDSKPSTSSDAEAGPS GSQQLQIPAQPASSLGADTMSAGGGGPLGDNNQGADGVGNASGDWHCDSTWMGDRV VTKSTRTWVLPSYNNHQYREIKSGSVDGSNANAYFGYSTPWGYFDFNRFHSHWSPRD WQRLINNYWGFRPRSLRVKIFNIQVKEVTVQDSTTTIANNLTSTVQVFTDDDYQLPYVV GNGTEGCLPAFPPQVFTLPQYGYATLNRDNTENPTERSSFFCLEYFPSKMLRTGNNFEFT YNFEEVPFHSSFAPSQNLFKLANPLVDQYLYRFVSTNNTGGVQFNKNLAGRYANTYKN WFPGPMGRTQGWNLGSGVNRASVSAFATTNRMELEGASYQVPPQPNGMTNNLQGSN TYALENTMIFNSQPANPGTTATYLEGNMLITSESETQPVNRVAYNVGGQMATNNQSST TAPX¹X²X³X⁴X⁵X⁶X⁷X⁸X⁹IVPGSVWMERDVYLQGPIWAKIPETGAHFHPSPAMGGFGLK HPPPMMLIKNTPVPGNITSFSDVPVSSFITQYSTGQVTVEMEWELKKENSKRWNPEIQYT NNYNDPQFVDFAPDSTGEYRTTRPIGTRYLTRPL), in which the 581-589 region has a sequence of X¹X²X³X⁴X⁵X⁶X⁷X⁸X⁹; wherein X¹, X², X³, X⁴, X⁵, X⁶, X⁷, X⁸, and X⁹ are each independently selected from A, R, N, D, C, E, Q, G, H, I, L, K, M, F, P, S, T, W, Y, and V.

[0116] It should be understood that the present disclosure includes polynucleotide sequences encoding for any sequence disclosed herein. For example, if an amino acid sequence is provided, the present disclosure also encompasses a polynucleotide sequence encoding for said amino acid sequence.

[0117] It should be understood that further embodiments include mutations in VP1, VP2, VP3, or any combination thereof that do not alter the desired properties (e.g., a particular tissue tropism) or affect viral assembly, as described herein.

[0118] An rAAV virion is made of a capsid that may include the engineered AAV5 VP capsid polypeptides disclosed herein (e.g., VP1, VP2, and VP3 capsid polypeptides).

### Engineered Capsids and Capsid Polypeptides for Tissue Tropism

[0119] Described herein are engineered capsids, engineered capsid polypeptides, and 581-589 regions of capsid polypeptides that confer tissue tropism (e.g., tissue-specific accumulation, tissue-specific infection, or both) to a viral capsid. In some embodiments, an engineered capsid may comprise one or more engineered capsid polypeptides assembled into a recombinant adeno-associated virus (rAAV) viral capsid. In some embodiments, an engineered capsid polypeptide may comprise a variation in the 581-589 region. The 581-589 region of viral capsid polypeptides, corresponding to amino acid residues 581 to 589 of the VP1 polypeptide, amino acid residues 445 to 453 of the VP2 polypeptide, and amino acid residues 389 to 397 of the VP3 polypeptide, is located at the AAV interface that interacts with host cells and tissues.

[0120] Also described herein are methods of using engineered capsids comprising engineered capsid polypeptides with 581-589 regions for tissue-specific delivery of a payload (e.g., a polynucleotide, such as a transgene) encapsidated by the engineered capsid. Recombinant AAVs comprising VP capsid polypeptides with 581-589 regions engineered for tissue specificity may be used to specifically infect a target tissue. Using tissue-tropic rAAV viral capsids for payload delivery provides numerous advantages over using adeno-associated virus (AAV) viral capsids that lack tissue tropism including reduced toxicity, lower dose needed to produce a therapeutic effect, wider therapeutic window, and reduced immune response. Furthermore, tissue-specific payload delivery may enable targeted therapies even when administering systemically. For example, a central nervous (CNS) tissue-tropic rAAV viral capsid may be systemically administered to specifically deliver a payload to the CNS for treatment of a neurological disease. In another example, a muscle-tropic rAAV viral capsid may be systemically administered to specifically deliver a payload to muscle for treatment of a muscular disease, including cardiac muscle and vascular diseases.

[0121] In some embodiments, a tissue-tropic capsid of the present disclosure may be CNS tissue-tropic. For example, a CNS tissue-tropic capsid polypeptide may confer tropism for one or more CNS tissues (e.g., hippocampus (dentate gyrus, CA1, or CA3), cerebellum, hypothalamus, cortex (occipital, temporal, or forebrain), substantia nigra, thalamus, or combinations thereof). In some embodiments, a tissue-tropic capsid, engineered capsid polypeptide, or 581-589 region of a capsid polypeptide may be muscle-tropic. For example, a muscle-tropic capsid polypeptide may confer tropism for one or more muscle tissues (e.g., aorta, esophagus, heart (including atrium, ventricle, valves), skeletal muscle (including biceps, brachii, femoris, diaphragm, gastrocnemius, tibialis anterior, triceps, quadriceps, including vastus lateralis)), or muscle fibers (e.g., type I (slow oxidative) fibers, type IC fibers, type II fibers, type IIC fibers, type IIA (fast oxidative/glycolytic) fibers, type IIAX fibers, type IIXA fibers, type IIX (fast glycolytic) fibers, or combinations thereof).

[0122] An engineered capsid polypeptide of the present disclosure may comprise one or more amino acid substitutions relative to an AAV5 viral protein (VP) polypeptide (e.g., a VP1 polypeptide of SEQ ID NO: 1, a VP2 polypeptide of SEQ ID NO: 10, or a VP3 polypeptide of SEQ ID NO: 11). The engineered capsid polypeptide may comprise one or more amino acid substitutions relative to a VP1 polypeptide of any or all of SEQ ID NO: 3-SEQ ID NO: 8. In some embodiments, the engineered capsid polypeptide may comprise a 581-589 region comprising one or more amino acid substitutions in a region of a VP polypeptide (e.g., a 581-589 region of VP1, VP2, VP3, or a combination thereof) corresponding to amino acid residues 581 to 589 of VP1 (e.g., SEQ ID NO: 1), amino acid residues 445 to 453 of VP2 (e.g., SEQ ID NO: 10), or amino acid residues 389 to 397 of VP3 (e.g., SEQ ID NO: 11). In some embodiments, the 581-589 region may be present in VP1, VP2, and VP3. An engineered viral capsid may be assembled from VP1, VP2, and VP3 polypeptides comprising a 581-589 region with one or more amino acid substitutions. In some embodiments, the 581-589 region may confer or increase the likelihood of conferring CNS tissue-tropism. For example, a 581-589 region with increased likelihood of conferring CNS tissue-tropism may comprise a sequence of any one of SEQ ID NO: 12-SEQ ID NO: 3937, SEQ ID NO: 3938-SEQ ID NO: 4237, or SEQ ID NO: 5234-SEQ ID NO: 5807. In some embodiments, the 581-589 region may confer or increase the likelihood of conferring muscle-tropism. For example, a 581-589 region with increased likelihood of conferring muscle-tropism may comprise a sequence of any one of SEQ ID NO: 4238-SEQ ID NO: 4933, SEQ ID NO: 4934-SEQ ID NO: 5233, or SEQ ID NO: 5808-SEQ ID NO: 5811.

[0123] In some embodiments, the 581-589 region may confer or increase the likelihood of conferring CNS tissue-tropism. For example, a 581-589 region with increased likelihood of conferring CNS tissue-tropism may comprise a sequence of any one of SEQ ID NO: 12-SEQ ID NO: 3937 or SEQ ID NO: 3938-SEQ ID NO: 4237. In some embodiments, the 581-589 region may confer or increase the likelihood of conferring muscle-tropism. For example, a 581-589 region with increased likelihood of conferring muscle-tropism may comprise a sequence of any one of SEQ ID NO: 4238-SEQ ID NO: 4933 or SEQ ID NO: 4934-SEQ ID NO: 5233.

### Capsid Engineering Methods

[0124] Disclosed herein is a system for high-throughput engineering of engineered AAV capsids with modified function, including increased or decreased infectivity of desired tissues, such as increased targeting of the central nervous system (CNS), increased targeting of muscle, decreased targeting of non-CNS tissue, or decreased targeting of non-muscle tissue relative to a wild type AAV5 capsid (e.g., comprising a VP capsid polypeptide of SEQ ID NO: 1). A general schematic of the process is shown in FIG. 1. However, it should be understood that the present disclosure also encompasses reasonable variations or extensions to the method that are understood to those of ordinary skill in the art. As shown in FIG. 1, the method may begin with production of a capsid library with theoretical diversity of 5×10¹¹ (5e11) unique sequence variants. Higher or lower theoretical diversities are also encompassed herein. For example, a capsid library may have a theoretical diversity of from about 1×10³ (1e3) to about 1×10²⁰ (1e20). The library may then be cloned into plasmids, transformed into bacteria, and subsequently, library plasmids are screened for productive virion assembly in a production cell line. The assembled virions may then be administered intravenously into non-human primates (NHP). After a period of time sufficient for distribution, infection, and stable transduction, the NHP may be sacrificed, organs harvested, and sequences of AAV capsids in each tissue may be determined by deep sequencing.

[0125] FIG. 2A provides a side view (top panel) and top view (bottom panel) of the surface of a prototype AAV virion, identifying residues of known AAV capsids, including AAV2, AAV5, AAV6, and AAV9, that have been shown in the research literature to interact with target cells. These target-interacting residues correspond to amino acids 581 to 589 in the AAV5 VP1 capsid protein.

[0126] FIG. 2B shows the salient elements of the library plasmid, illustrating rep and cap coding sequences positioned between AAV ITRs. In the illustrated embodiment, further described in EXAMPLE 1, variation is introduced into each of residues 581 to 589 of the AAV5 cap protein (“Library variant region”) that is present in VP1, VP2, and VP3. Each of the 20 natural amino acids is introduced at each of the 9 positions of the 581-589 region, providing a theoretical library diversity of 20⁹ (20\hat{ }9; approximately 5×10¹¹ (5e11)) unique sequence variants.

[0127] The 581-589 region targeted for engineering is the most likely to interact with target cell receptors, and relatively tolerant to changes without disrupting virion assembly. Unlike earlier approaches that add unstructured peptides that protrude above the virion 3-fold axis of symmetry, the current approach introduces sequence diversity that alters the characteristics of the binding pocket. In addition, this approach may change the overall structure of the receptor-binding trimer, allowing for altered allosteric interactions outside the binding pocket (e.g., AAVR PKD1). Introduced diversity is non-random, thereby reducing missense and frameshifts of randomized libraries.

[0128] By cloning the polynucleotide encoding the capsid variants into the packaged viral genome (between the ITRs), the recombinant virions with variant capsids carry polynucleotides having their cognate mutation, so the unique variant providing the desired function can be identified by sequencing packaged virus or infected cells.

[0129] In some embodiments, the capsid is a capsid selected from AAV1, AAV2, AAV3, AAV4, AAV5, AAV6, AAV7, AAV8, AAV9, AAV 10, AAV11, AAV12, AAV13, AAV14, AAV15, AAV16, AAV-DJ, AAV-DJ/8, AAV-DJ/9, AAV1/2, AAV.rh8, AAV.rh10, AAV.rh20, AAV.rh39, AAV.Rh43, AAV.Rh74, AAV.v66, AAV.Oligo001, AAV.SCH9, AAV.r3.45, AAV.RHM4-1, AAV.hu37, AAV.Anc80, AAV.Anc80L65, AAV.7m8, AAV.PhP.eB, AAV.PhP.V1, AAV.PHP.B, AAV.PhB.C1, AAV.PhB.C2, AAV.PhB.C3, AAV.PhB.C6, AAV.cy5, AAV2.5, AAV2tYF, AAV3B, AAV.LK03, AAV.HSC1, AAV.HSC2, AAV.HSC3, AAV.HSC4, AAV.HSC5, AAV.HSC6, AAV.HSC7, AAV.HSC8, AAV.HSC9, AAV.HSC10, AAV.HSC11, AAV.HSC12, AAV.HSC13, AAV.HSC14, AAV.HSC15, AAV.HSC16, AAV.HSC17, or AAVhu68 (for example, as described in WO2020/033842, incorporated herein by reference in its entirety). For example, the capsid may be an AAV5 capsid. The hu68 capsid is described in WO 2018/160582, incorporated herein by reference in its entirety.

[0130] Such capsids may comprise a 581-589 region corresponding amino acid residues 581 to 589 of the AAV5 VP1, and as such analogous engineered VP capsids with desired tissue tropism or preference, ability to assemble, and exhibit various other desired traits are encompassed herein. Thus, any one of the engineered AAV5 VP capsid polypeptides disclosed herein having a mutation or substitution in the 581-589 region corresponding to the 581 to 589 region of AAV5 VP1 may be inserted into the corresponding region in any one of the other AAV capsids described herein and the present disclosure encompasses such variants.

[0131] In some embodiments, the capsid is a derivative, modification, or pseudotype of AAV1, AAV2, AAV3, AAV4, AAV5, AAV6, AAV7, AAV8, AAV9, AAV 10, AAV11, AAV12, AAV13, AAV14, AAV15, AAV16, AAV-DJ, AAV-DJ/8, AAV-DJ/9, AAV1/2, AAV.rh8, AAV.rh10, AAV.rh20, AAV.rh39, AAV.Rh43, AAV.Rh74, AAV.v66, AAV.Oligo001, AAV.SCH9, AAV.r3.45, AAV.RHM4-1, AAV.hu37, AAV.Anc80, AAV.Anc80L65, AAV.7m8, AAV.PhP.eB, AAV.PhP.V1, AAV.PHP.B, AAV.PhB.C1, AAV.PhB.C2, AAV.PhB.C3, AAV.PhB.C6, AAV.cy5, AAV2.5, AAV2tYF, AAV3B, AAV.LK03, AAV.HSC1, AAV.HSC2, AAV.HSC3, AAV.HSC4, AAV.HSC5, AAV.HSC6, AAV.HSC7, AAV.HSC8, AAV.HSC9, AAV.HSC10, AAV.HSC11, AAV.HSC12, AAV.HSC13, AAV.HSC14, AAV.HSC15, AAV.HSC16, AAV.HSC17, or AAVhu68. For example, the capsid may be a derivative of AAV5.

[0132] In some embodiments, capsid protein is a chimera of capsid proteins from two or more serotype selected from AAV1, AAV2, AAV3, AAV4, AAV5, AAV6, AAV7, AAV8, AAV9, AAV 10, AAV11, AAV12, AAV13, AAV14, AAV15, AAV16, AAV-DJ, AAV-DJ/8, AAV-DJ/9, AAV1/2, AAV.rh8, AAV.rh10, AAV.rh20, AAV.rh39, AAV.Rh43, AAV.Rh74, AAV.v66, AAV.Oligo001, AAV.SCH9, AAV.r3.45, AAV.RHM4-1, AAV.hu37, AAV.Anc80, AAV.Anc80L65, AAV.7m8, AAV.PhP.eB, AAV.PhP.V1, AAV.PHP.B, AAV.PhB.C1, AAV.PhB.C2, AAV.PhB.C3, AAV.PhB.C6, AAV.cy5, AAV2.5, AAV2tYF, AAV3B, AAV.LK03, AAV.HSC1, AAV.HSC2, AAV.HSC3, AAV.HSC4, AAV.HSC5, AAV.HSC6, AAV.HSC7, AAV.HSC8, AAV.HSC9, AAV.HSC10, AAV.HSC11, AAV.HSC12, AAV.HSC13, AAV.HSC14, AAV.HSC15, AAV.HSC16, AAV.HSC17, or AAVhu68 (for example, as described in WO2020/033842, incorporated herein by reference in its entirety). In certain embodiments, the capsid is an rh32.33 capsid, described in U.S. Pat. No. 8,999,678, incorporated herein by reference in its entirety.

[0133] Such capsids may comprise a 581-589 region corresponding to 581 to 589 of the AAV5 VP1, and as such analogous engineered VP capsids with desired tissue tropism or preference, ability to assemble, and exhibit various other desired traits are encompassed herein.

### VP-Encoding Polynucleotides, Vectors, and Vector Libraries

[0134] Accordingly, in a first aspect, polynucleotides are provided. The polynucleotides encode an adeno-associated virus (AAV) VP1 capsid polypeptide having the amino acid sequence of SEQ ID NO: 2, wherein X¹, X², X³, X⁴, X⁵, X⁶, X⁷, X⁸, and X⁹ are each independently selected from the 20 naturally occurring amino acids, using standard one letter codes, from A, R, N, D, C, E, Q, G, H, I, L, K, M, F, P, S, T, W, Y, and V. The sequence X¹X²X³X⁴X⁵X⁶X⁷X⁸X⁹ of SEQ ID NO: 2 corresponds to the 581-589 region of VP1. The polynucleotide encodes a polypeptide that includes at least one mutation of the native AAV5 capsid and thus does not have the sequence of SEQ ID NO: 1. In addition, the polypeptide does not have the sequence of SEQ ID NO: 3 (MSFVDHPPDWLEEVGEGLREFLGLEAGPPKPKPNQQHQDQARGLVLPGYNYLGPGNG LDRGEPVNRADEVAREHDISYNEQLEAGDNPYLKYNHADAEFQEKLADDTSFGGNLG KAVFQAKKRVLEPFGLVEEGAKTAPTGKRIDDHFPKRKKARTEEDSKPSTSSDAEAGPS GSQQLQIPAQPASSLGADTMSAGGGGPLGDNNQGADGVGNASGDWHCDSTWMGDRV VTKSTRTWVLPSYNNHQYREIKSGSVDGSNANAYFGYSTPWGYFDFNRFHSHWSPRD WQRLINNYWGFRPRSLRVKIFNIQVKEVTVQDSTTTIANNLTSTVQVFTDDDYQLPYVV GNGTEGCLPAFPPQVFTLPQYGYATLNRDNTENPTERSSFFCLEYFPSKMLRTGNNFEFT YNFEEVPFHSSFAPSQNLFKLANPLVDQYLYRFVSTNNTGGVQFNKNLAGRYANTYKN WFPGPMGRTQGWNLGSGVNRASVSAFATTNRMELEGASYQVPPQPNGMTNNLQGSN TYALENTMIFNSQPANPGTTATYLEGNMLITSESETQPVNRVAYNVGGQMATNNQSST TAPATGTVNLQEIVPGSVWMERDVYLQGPIWAKIPETGAHFHPSPAMGGFGLKHPPPM MLIKNTPVPGNIT SFSDVPVSSFITQYSTGQVTVEMEWELKKENSKRWNPEIQYTNNYN DPQFVDFAPDSTGEYRTTRPIGTRYLTRPL), SEQ ID NO: 4 (MSFVDHPPDWLEEVGEGLREFLGLEAGPPKPKPNQQHQDQARGLVLPGYNYLGPGNG LDRGEPVNRADEVAREHDISYNEQLEAGDNPYLKYNHADAEFQEKLADDTSFGGNLG KAVFQAKKRVLEPFGLVEEGAKTAPTGKRIDDHFPKRKKARTEEDSKPSTSSDAEAGPS GSQQLQIPAQPASSLGADTMSAGGGGPLGDNNQGADGVGNASGDWHCDSTWMGDRV VTKSTRTWVLPSYNNHQYREIKSGSVDGSNANAYFGYSTPWGYFDFNRFHSHWSPRD WQRLINNYWGFRPRSLRVKIFNIQVKEVTVQDSTTTIANNLTSTVQVFTDDDYQLPYVV GNGTEGCLPAFPPQVFTLPQYGYATLNRDNTENPTERSSFFCLEYFPSKMLRTGNNFEFT YNFEEVPFHSSFAPSQNLFKLANPLVDQYLYRFVSTNNTGGVQFNKNLAGRYANTYKN WFPGPMGRTQGWNLGSGVNRASVSAFATTNRMELEGASYQVPPQPNGMTNNLQGSN TYALENTMIFNSQPANPGTTATYLEGNMLITSESETQPVNRVAYNVGGQMATNNQSST TAPATGTYNTQEIVPGSVWMERDVYLQGPIWAKIPETGAHFHPSPAMGGFGLKHPPPM MLIKNTPVPGNITSFSDVPVSSFITQYSTGQVTVEMEWELKKENSKRWNPEIQYTNNYN DPQFVDFAPDSTGEYRTTRPIGTRYLTRPL), SEQ ID NO: 5 (MSFVDHPPDWLEEVGEGLREFLGLEAGPPKPKPNQQHQDQARGLVLPGYNYLGPGNG LDRGEPVNRADEVAREHDISYNEQLEAGDNPYLKYNHADAEFQEKLADDTSFGGNLG KAVFQAKKRVLEPFGLVEEGAKTAPTGKRIDDHFPKRKKARTEEDSKPSTSSDAEAGPS GSQQLQIPAQPASSLGADTMSAGGGGPLGDNNQGADGVGNASGDWHCDSTWMGDRV VTKSTRTWVLPSYNNHQYREIKSGSVDGSNANAYFGYSTPWGYFDFNRFHSHWSPRD WQRLINNYWGFRPRSLRVKIFNIQVKEVTVQDSTTTIANNLTSTVQVFTDDDYQLPYVV GNGTEGCLPAFPPQVFTLPQYGYATLNRDNTENPTERSSFFCLEYFPSKMLRTGNNFEFT YNFEEVPFHSSFAPSQNLFKLANPLVDQYLYRFVSTNNTGGVQFNKNLAGRYANTYKN WFPGPMGRTQGWNLGSGVNRASVSAFATTNRMELEGASYQVPPQPNGMTNNLQGSN TYALENTMIFNSQPANPGTTATYLEGNMLITSESETQPVNRVAYNVGGQMATNNQSST TAPTTGTYNLQEIVPGSVWMERDVYLQGPIWAKIPETGAHFHPSPAMGGFGLKHPPPM MLIKNTPVPGNITSFSDVPVSSFITQYSTGQVTVEMEWELKKENSKRWNPEIQYTNNYN DPQFVDFAPDSTGEYRTTRPIGTRYLTRPL), SEQ ID NO: 6 (MSFVDHPPDWLEEVGEGLREFLGLEAGPPKPKPNQQHQDQARGLVLPGYNYLGPGNG LDRGEPVNRADEVAREHDISYNEQLEAGDNPYLKYNHADAEFQEKLADDTSFGGNLG KAVFQAKKRVLEPFGLVEEGAKTAPTGKRIDDHFPKRKKARTEEDSKPSTSSDAEAGPS GSQQLQIPAQPASSLGADTMSAGGGGPLGDNNQGADGVGNASGDWHCD STWMGDRV VTKSTRTWVLPSYNNHQYREIKSGSVDGSNANAYFGYSTPWGYFDFNRFHSHWSPRD WQRLINNYWGFRPRSLRVKIFNIQVKEVTVQDSTTTIANNLTSTVQVFTDDDYQLPYVV GNGTEGCLPAFPPQVFTLPQYGYATLNRDNTENPTERSSFFCLEYFPSKMLRTGNNFEFT YNFEEVPFHSSFAPSQNLFKLANPLVDQYLYRFVSTNNTGGVQFNKNLAGRYANTYKN WFPGPMGRTQGWNLGSGVNRASVSAFATTNRMELEGASYQVPPQPNGMTNNLQGSN TYALENTMIFNSQPANPGTTATYLEGNMLITSESETQPVNRVAYNVGGQMATNNQSST TAPAAGTYNLQEIVPGSVWMERDVYLQGPIWAKIPETGAHFHPSPAMGGFGLKHPPPM MLIKNTPVPGNIT SFSDVPVSSFITQYSTGQVTVEMEWELKKENSKRWNPEIQYTNNYN DPQFVDFAPDSTGEYRTTRPIGTRYLTRPL), SEQ ID NO: 7 (MSFVDHPPDWLEEVGEGLREFLGLEAGPPKPKPNQQHQDQARGLVLPGYNYLGPGNG LDRGEPVNRADEVAREHDISYNEQLEAGDNPYLKYNHADAEFQEKLADDTSFGGNLG KAVFQAKKRVLEPFGLVEEGAKTAPTGKRIDDHFPKRKKARTEEDSKPSTSSDAEAGPS GSQQLQIPAQPASSLGADTMSAGGGGPLGDNNQGADGVGNASGDWHCDSTWMGDRV VTKSTRTWVLPSYNNHQYREIKSGSVDGSNANAYFGYSTPWGYFDFNRFHSHWSPRD WQRLINNYWGFRPRSLRVKIFNIQVKEVTVQDSTTTIANNLTSTVQVFTDDDYQLPYVV GNGTEGCLPAFPPQVFTLPQYGYATLNRDNTENPTERSSFFCLEYFPSKMLRTGNNFEFT YNFEEVPFHSSFAPSQNLFKLANPLVDQYLYRFVSTNNTGGVQFNKNLAGRYANTYKN WFPGPMGRTQGWNLGSGVNRASVSAFATTNRMELEGASYQVPPQPNGMTNNLQGSN TYALENTMIFNSQPANPGTTATYLEGNMLITSESETQPVNRVAYNVGGQMATNNQSST TAPATGAYNLQEIVPGSVWMERDVYLQGPIWAKIPETGAHFHPSPAMGGFGLKHPPPM MLIKNTPVPGNITSFSDVPVSSFITQYSTGQVTVEMEWELKKENSKRWNPEIQYTNNYN DPQFVDFAPDSTGEYRTTRPIGTRYLTRPL), or SEQ ID NO: 8 (MSFVDHPPDWLEEVGEGLREFLGLEAGPPKPKPNQQHQDQARGLVLPGYNYLGPGNG LDRGEPVNRADEVAREHDISYNEQLEAGDNPYLKYNHADAEFQEKLADDTSFGGNLG KAVFQAKKRVLEPFGLVEEGAKTAPTGKRIDDHFPKRKKARTEEDSKPSTSSDAEAGPS GSQQLQIPAQPASSLGADTMSAGGGGPLGDNNQGADGVGNASGDWHCDSTWMGDRV VTKSTRTWVLPSYNNHQYREIKSGSVDGSNANAYFGYSTPWGYFDFNRFHSHWSPRD WQRLINNYWGFRPRSLRVKIFNIQVKEVTVQDSTTTIANNLTSTVQVFTDDDYQLPYVV GNGTEGCLPAFPPQVFTLPQYGYATLNRDNTENPTERSSFFCLEYFPSKMLRTGNNFEFT YNFEEVPFHSSFAPSQNLFKLANPLVDQYLYRFVSTNNTGGVQFNKNLAGRYANTYKN WFPGPMGRTQGWNLGSGVNRASVSAFATTNRMELEGASYQVPPQPNGMTNNLQGSN TYALENTMIFNSQPANPGTTATYLEGNMLITSESETQPVNRVAYNVGGQMATNNQSST TAPATGTVNTQEIVPGSVWMERDVYLQGPIWAKIPETGAHFHPSPAMGGFGLKHPPPM MLIKNTPVPGNIT SFSDVPVSSFITQYSTGQVTVEMEWELKKENSKRWNPEIQYTNNYN DPQFVDFAPDSTGEYRTTRPIGTRYLTRPL). In some embodiments, the VP1 capsid polypeptide comprises a variation in the 581-589 region. For example, a VP1 capsid polypeptide comprising a variant 581-589 region may comprise a sequence of SEQ ID NO: 1 in which residues 581 to residue 589 are replaced with a sequence of X¹X²X³X⁴X⁵X⁶X⁷X⁸X⁹, wherein X¹, X², X³, X⁴, X⁵, X⁶, X⁷, X⁸, and X⁹ are each independently selected from A, R, N, D, C, E, Q, G, H, I, L, K, M, F, P, S, T, W, Y, and V, and wherein the VP1 capsid polypeptide does not have the sequence of any of SEQ ID NO: 1, SEQ ID NO: 3, SEQ ID NO: 4, SEQ ID NO: 5, SEQ ID NO: 6, SEQ ID NO: 7, or SEQ ID NO: 8.

[0135] In some embodiments, the polynucleotide encodes an AAV VP1 capsid polypeptide that further comprises one or more mutations at an amino acid residue outside of the 581-589 region, with reference to SEQ ID NO: 1, wherein the resulting recombinant capsid is capable of forming an assembled virion that exhibits desired tissue targeting as compared to wild type AAV5 (SEQ ID NO: 1). The one or more mutations may confer increased tissue tropism (e.g., increased CNS tissue tropism or increased muscle tissue tropism) or tissue preference (e.g., increased CNS tissue preference or increased muscle tissue preference) on the assembled virion as compared to a wild type AAV5 capsid polypeptide.

[0136] In another aspect, a vector capable of replication in prokaryotic cells is provided, wherein the vector comprises the polynucleotide described immediately above. In typical embodiments, the vector is a plasmid encoding a replication competent AAV genome.

[0137] In a further aspect, a library is provided. The library comprises a plurality of vectors comprising the AAV capsid-encoding polynucleotides. In some embodiments, the vectors are plasmids, and the plurality of plasmids comprise a plurality of different AAV VP-encoding polynucleotides. The library may comprise a plurality of vectors encoding AAV VP1 capsid polypeptides having the amino acid sequence of SEQ ID NO: 2 comprising one or more amino acid variations in the 581-589 region.

[0138] In various embodiments, the library encodes at least 1×10⁹ (1e9) different AAV VP capsid polypeptides, at least 2.5×10⁹ (2.5e9) different AAV VP capsid polypeptides, at least 5×10⁹ (5e9) different AAV VP capsid polypeptides, at least 7.5×10⁹ (7.5e9) different AAV VP capsid polypeptides, at least 1×10¹⁰ (1e10) different AAV VP capsid polypeptides, at least 2.5×10¹⁰ (2.5e10) different AAV VP capsid polypeptides, at least 5×10¹⁰ (5e10) different AAV VP capsid polypeptides, at least 7.5×10¹⁰ (7.5e10) different AAV VP capsid polypeptides, at least 1×10¹¹ (1e11) different AAV VP capsid polypeptides, at least 2.5×10¹¹ (2.5e11) different AAV VP capsid polypeptides, or at least 5×10¹¹ (5e11) different AAV VP capsid polypeptides. The library may encode VP capsid polypeptides comprising 581-589 region variants.

[0139] In another aspect, prokaryotic cells comprising the vectors are provided. In some embodiments, the prokaryotic cell is an E. coli cell and the vector is a plasmid.

[0140] In a related aspect, libraries are provided, the library comprising a plurality of E. coli cells, wherein the plurality of cells comprise a plurality of plasmids, wherein the plurality of plasmids comprise a plurality of different AAV VP-encoding polynucleotides.

[0141] In some embodiments, the library encodes at least 1×10⁹ (1e9) different AAV VP capsid polypeptides, at least 2.5×10⁹ (2.5e9) different AAV VP capsid polypeptides, at least 5×10⁹ (5e9) different AAV VP capsid polypeptides, at least 7.5×10⁹ (7.5e9) different AAV VP capsid polypeptides, at least 1×10¹⁰ (1e10) different AAV VP capsid polypeptides, at least 5×10¹⁰ (5e10) different AAV VP capsid polypeptides, at least 7.5×10¹⁰ (7.5e10) different AAV VP capsid polypeptides, at least 1×10¹¹ (1e11) different AAV VP capsid polypeptides, at least 2.5×10¹¹ (2.5e11) different AAV VP capsid polypeptides, or at least 5×10¹¹ (5e1l) different AAV VP capsid polypeptides. The library may encode VP capsid polypeptides comprising 581-589 region variants.

### VP Polypeptides, Peptide Libraries

[0142] In another aspect, AAV VP1 capsid polypeptides are provided. The polypeptide has the amino acid sequence of SEQ ID NO: 2, wherein X¹, X², X³, X⁴, X⁵, X⁶, X⁷, X⁸, and X⁹ are each independently selected from A, R, N, D, C, E, Q, G, H, I, L, K, M, F, P, S, T, W, Y, and V. The polypeptide includes at least one mutation as compared to native AAV VP1, and thus does not have the sequence of SEQ ID NO: 1. In addition, the polypeptide does not have the sequence of SEQ ID NO: 3, SEQ ID NO: 4, SEQ ID NO: 5, SEQ ID NO: 6, SEQ ID NO: 7, or SEQ ID NO: 8.

[0143] In some embodiments, the polypeptide further comprises one or more mutations at an amino acid residue outside of the 581-589 region, with reference to SEQ ID NO: 1, wherein the resulting recombinant capsid is capable of forming an assembled virion that exhibits desired tissue targeting as compared to wild type AAV5 (SEQ ID NO: 1).

[0144] In a further aspect, libraries are provided, the libraries comprising a plurality of polypeptides as described immediately above, the plurality having different primary amino acid sequences. A library may comprise a plurality of polypeptides of SEQ ID NO: 2 comprising one or more amino acid variations in the 581-589 region.

[0145] In some embodiments, library comprises at least 1×10⁹ (1e9) different AAV VP capsid polypeptides, at least 2.5×10⁹ (2.5e9) different AAV VP capsid polypeptides, at least 5×10⁹ (5e9) different AAV VP capsid polypeptides, at least 7.5×10⁹ (7.5e9) different AAV VP capsid polypeptides, at least 1×10¹⁰ (1e10) different AAV VP capsid polypeptides, at least 2.5×10¹⁰ (2.5e10) different AAV VP capsid polypeptides, at least 5×10¹⁰ (5e10) different AAV VP capsid polypeptides, at least 7.5×10¹⁰ (7.5e10) different AAV VP capsid polypeptides, at least 1×10¹¹ (1e11) different AAV VP capsid polypeptides, at least 2.5×10¹¹ (2.5e11) different AAV VP capsid polypeptides, or at least 5×10¹¹ (5e11) different AAV VP capsid polypeptides. The library may comprise VP capsid polypeptides comprising 581-589 region variants.

[0146] In certain embodiments, the library comprises at least from about 1×10⁵ (1e5) to at least about 5×10¹¹ (5e11) different AAV VP capsid polypeptides. In certain embodiments, the library comprises at least about 1×10⁵ (1e5), at least about 2×10⁵ (2e5), at least about 3×10⁵ (3e5), at least about 4×10⁵ (4e5), at least about 5×10⁵ (5e5), at least about 6×10⁵ (6e5), at least about 7×10⁵ (7e5), at least about 8×10⁵ (8e5), at least about 9×10⁵ (9e5), at least about 1×10⁶ (1e6), at least about 2×10⁶ (2e6), at least about 3×10⁶ (3e6), at least about 4×10⁶ (4e6), at least about 5×10⁶ (5e6), at least about 6×10⁶ (6e6), at least about 7×10⁶ (7e6), at least about 8×10⁶ (8e6), at least about 9×10⁶ (9e6), at least about 1×10⁷ (1e7), at least about 2×10⁷ (2e7), at least about 3×10⁷ (3e7), at least about 4×10⁷ (4e7), at least about 5×10⁷ (5e7), at least about 6×10⁷ (6e7), at least about 7×10⁷ (7e7), at least about 8×10⁷ (8e7), at least about 9×10⁷ (9e7), at least about 1×10⁸ (1e8), at least about 2×10⁸ (2e8), at least about 3×10⁸ (3e8), at least about 4×10⁸ (4e8), at least about 5×10⁸ (5e8), at least about 6×10⁸ (6e8), at least about 7×10⁸ (7e8), at least about 8×10⁸ (8e8), at least about 9×10⁸ (9e8), at least about 1×109 (1e9), at least about 2×10⁹ (2e9), at least about 3×10⁹ (3e9), at least about 4×10⁹ (4e9), at least about 5×10⁹ (5e9), at least about 6×10⁹ (6e9), at least about 7×10⁹ (7e9), at least about 8×10⁹ (8e9), at least about 9×10⁹ (9e9), at least about 1×10¹⁰ (1e10), at least about 2×10¹⁰ (2e10), at least about 3×10¹⁰ (3e10), at least about 4×10¹⁰ (4e10), at least about 5×10¹⁰ (5e10), at least about 6×10¹⁰ (6e10), at least about 7×10¹⁰ (7e10), at least about 8×10¹⁰ (8e10), at least about 9×10¹⁰ (9e10), at least about 1×10¹¹ (1e11), at least about 2×10¹¹ (2e11), at least about 3×10¹¹ (3e11), at least about 4×10¹¹ (4e11), or at least about 5×10¹¹ (5e1l) AAV VP capsid polypeptides.

[0147] In certain embodiments, provided herein is a recombinant adeno-associated virus AAV VP1 capsid polypeptide having at least one mutation in a residue of region 581 to residue 589 in SEQ ID NO: 1, inclusive, wherein the mutation confers at least about 1.1-fold, at least about 1.2-fold, at least about 1.3-fold, at least about 1.4-fold, at least about 1.5-fold, at least about 1.6-fold, at least about 1.7-fold, at least about 1.8-fold, at least about 1.9-fold, at least about 2-fold, at least about 2.2-fold, at least about 2.4-fold, at least about 2.6-fold, at least about 2.8-fold, at least about 3-fold, at least about 3.5-fold, at least about 4-fold, at least about 4.5-fold, at least about 5-fold, at least about 6-fold, at least about 7-fold, at least about 8-fold, at least about 9-fold, at least about 10-fold, at least about 20-fold, at least about 30-fold, at least about 40-fold, at least about 50-fold, at least about 100-fold, at least about 200-fold, at least about 300-fold, at least about 400-fold, or at least about 500-fold increased accumulation of an AAV virion having said AAV VP1 capsid polypeptide in a target tissue (e.g., a CNS tissue or a muscle tissue) relative to a non-target tissue, as compared to wild type AAV virion having a wild type AAV5 VP1 capsid polypeptide, and wherein the AAVVP1 capsid polypeptide does not have the sequence of any of SEQ ID NO: 1, SEQ ID NO: 3, SEQ ID NO: 4, SEQ ID NO: 5, SEQ ID NO: 6, SEQ ID NO: 7, or SEQ ID NO: 8. In some embodiments, a VP1 capsid polypeptide comprises a variation in the 581-589 region. For example, a VP1 capsid polypeptide comprising a 581-589 region may comprise a sequence of SEQ ID NO: 1 in which residues 581 to residue 589 are replaced with a sequence of X¹X²X³X⁴X⁵X⁶X⁷X⁸X⁹, wherein X¹, X², X³, X⁴, X⁵, X⁶, X⁷, X⁸, and X⁹ are each independently selected from A, R, N, D, C, E, Q, G, H, I, L, K, M, F, P, S, T, W, Y, and V, and wherein the VP1 capsid polypeptide does not have the sequence of any of SEQ ID NO: 1, SEQ ID NO: 3, SEQ ID NO: 4, SEQ ID NO: 5, SEQ ID NO: 6, SEQ ID NO: 7, or SEQ ID NO: 8. rAAV virions, virion libraries

[0148] In another aspect, recombinant AAV virions (rAAV) are provided. The virion comprises an AAV VP capsid polypeptide as described above. In some embodiments, the rAAV has increased tropism for primate and human CNS tissue as compared to a rAAV having the native AAV5 VP1 capsid polypeptide (SEQ ID NO:1). In some embodiments, the rAAV has increased tropism for primate and human muscle tissue as compared to a rAAV having the native AAV5 VP1 capsid polypeptide (SEQ ID NO:1). In some embodiments, the rAAV has increased ability to assemble, or exhibits greater virion stability, as compared to a rAAV having the native AAV5 VP1 capsid polypeptide (SEQ ID NO: 1).

[0149] In some embodiments, the rAAV has increased ability to cross the blood-brain barrier following intravenous administration as compared to a rAAV having the native AAV5 VP1 capsid polypeptide (SEQ ID NO: 1).

[0150] In certain of these embodiments, the rAAV has increased ability to infect one or more brain regions selected from hippocampus, dentate gyrus, cerebral cortex, temporal cortex, occipital cortex, thalamus, forebrain, substantia nigra, hypothalamus, cerebellum, and combinations thereof following systemic administration, as compared to a rAAV having the native AAV5 VP1 capsid polypeptide (SEQ ID NO: 1).

[0151] In some embodiments, the rAAV has increased ability to infect one or more brain regions selected from hippocampus, dentate gyrus, cerebral cortex, temporal cortex, occipital cortex, thalamus, forebrain, substantia nigra, hypothalamus, cerebellum, and combinations thereof following systemic administration, and also has reduced tropism for non-CNS tissues, as compared to a rAAV having the native AAV5 VP1 capsid polypeptide (SEQ ID NO: 1).

[0152] In some embodiments, the rAAV has increased ability to infect muscle tissue, including aorta, esophagus, heart (e.g., atrium, ventricle, valves), skeletal muscle (e.g., biceps, brachii, femoris, diaphragm, gastrocnemius, tibialis anterior, triceps, quadriceps, including vastus lateralis)), or muscle fibers, including type I (slow oxidative) fibers, type IC fibers, type II fibers, type IIC fibers, type IIA (fast oxidative/glycolytic) fibers, type IIAX fibers, type IIXA fibers, type IIX (fast glycolytic) fibers, or combinations thereof, following systemic administration, as compared to a rAAV having the native AAV5 VP1 capsid polypeptide (SEQ ID NO: 1).

[0153] In some embodiments, the rAAV has increased ability to infect muscle tissue, including aorta, esophagus, heart (e.g., atrium, ventricle, valves), skeletal muscle (e.g., biceps, brachii, femoris, diaphragm, gastrocnemius, tibialis anterior, triceps, quadriceps, including vastus lateralis)), or muscle fibers, including type I (slow oxidative) fibers, type IC fibers, type II fibers, type IIC fibers, type IIA (fast oxidative/glycolytic) fibers, type IIAX fibers, type IIXA fibers, type IIX (fast glycolytic) fibers, or combinations thereof, following systemic administration, and also has reduced tropism for non-muscle tissues, as compared to a rAAV having the native AAV5 VP1 capsid polypeptide (SEQ ID NO: 1).

[0154] Additionally, provided are polynucleotide sequences encoding the rAAV capsid VP proteins described herein.

[0155] In a further aspect, libraries are provided that comprise a plurality of rAAV as described above. The plurality of rAAVs comprise a plurality of VP capsid polypeptides having different primary amino acid sequences. An rAAV of the plurality of rAAVs may comprise a polypeptide of SEQ ID NO: 2 comprising one or more amino acid variations in the 581-589 region.

[0156] In some embodiments, the library comprises at least 1×10⁹ (1e5) different AAV VP capsid polypeptides, at least 2.5×10⁹ (2.5e9) different AAV VP capsid polypeptides, at least 5×10⁹ (5e9) different AAV VP capsid polypeptides, at least 7.5×10⁹ (7.5e9) different AAV VP capsid polypeptides, at least 1×10¹⁰ (1e10) different AAV VP capsid polypeptides, at least 2.5×10¹⁰ (2.5e10) different AAV VP capsid polypeptides, at least 5×10¹⁰ (5e10) different AAV VP capsid polypeptides, at least 7.5×10¹⁰ (7.5e10) different AAV VP capsid polypeptides, at least 1×10¹¹ (1e11) different AAV VP capsid polypeptides, at least 2.5×10¹¹ (2.5e11) different AAV VP capsid polypeptides, or at least 5×10¹¹ (5e11) different AAV VP capsid polypeptides. The library may comprise AAV VP capsid polypeptides comprising 581-589 region variants. For example, a VP1 capsid polypeptide comprising a 581-589 region may comprise a sequence of SEQ ID NO: 1 in which residues 581 to residue 589 are replaced with a sequence of X¹X²X³X⁴X⁵X⁶X⁷X⁸X⁹, wherein X¹, X², X³, X⁴, X⁵, X⁶, X⁷, X⁸, and X⁹ are each independently selected from A, R, N, D, C, E, Q, G, H, I, L, K, M, F, P, S, T, W, Y, and V, and wherein the VP1 capsid polypeptide does not have the sequence of any of SEQ ID NO: 1, SEQ ID NO: 3, SEQ ID NO: 4, SEQ ID NO: 5, SEQ ID NO: 6, SEQ ID NO: 7, or SEQ ID NO: 8.

### Pharmaceutical Compositions

[0157] In another aspect, pharmaceutical compositions are provided. The pharmaceutical composition comprises a rAAV as described above and a pharmaceutically acceptable carrier.

[0158] A pharmaceutical composition can comprise a first active ingredient. The first active ingredient can comprise a viral vector as described herein and/or any payload as described herein. The pharmaceutical composition can be formulated in unit dose form. The pharmaceutical composition can comprise a pharmaceutically acceptable excipient, diluent, or carrier. The pharmaceutical composition can comprise a second, third, or fourth active ingredient—such as to facilitate enhanced gene replacement, RNA editing, DNA editing, or imaging.

[0159] A pharmaceutical composition described herein can compromise an excipient. An excipient can comprise a cryo-preservative, such as DMSO, glycerol, polyvinylpyrrolidone (PVP), or any combination thereof. An excipient can comprise a cryo-preservative, such as a sucrose, a trehalose, a starch, a salt of any of these, a derivative of any of these, or any combination thereof Δn excipient can comprise a pH agent (to minimize oxidation or degradation of a component of the composition), a stabilizing agent (to prevent modification or degradation of a component of the composition), a buffering agent (to enhance temperature stability), a solubilizing agent (to increase protein solubility), or any combination thereof. An excipient can comprise a surfactant, a sugar, an amino acid, an antioxidant, a salt, a non-ionic surfactant, a solubilizer, a triglyceride, an alcohol, or any combination thereof. An excipient can comprise sodium carbonate, acetate, citrate, phosphate, poly-ethylene glycol (PEG), human serum albumin (HSA), sorbitol, sucrose, trehalose, polysorbate 80, sodium phosphate, sucrose, disodium phosphate, mannitol, polysorbate 20, histidine, citrate, albumin, sodium hydroxide, glycine, sodium citrate, trehalose, arginine, sodium acetate, acetate, HCl, disodium edetate, lecithin, glycerol, xanthan rubber, soy isoflavones, polysorbate 80, ethyl alcohol, water, teprenone, or any combination thereof.

[0160] Compositions and methods provided herein can utilize pharmaceutical compositions. The compositions described throughout can be formulated into a pharmaceutical and be used to treat a human or mammal, in need thereof, diagnosed with a disease. In some cases, pharmaceutical compositions can be used prophylactically.

[0161] The compositions provided herein can be utilized in methods provided herein. Any of the provided compositions provided herein can be utilized in methods provided herein. In some cases, a method comprises at least partially preventing, reducing, ameliorating, and/or treating a disease or condition, or a symptom of a disease or condition. A subject can be a human or non-human. A subject can be a mammal (e.g., rat, mouse, cow, dog, pig, sheep, horse). A subject can be a vertebrate or an invertebrate. A subject can be a laboratory animal. A subject can be a patient. A subject can be suffering from a disease. A subject can display symptoms of a disease. A subject may not display symptoms of a disease, but still have a disease. A subject can be under medical care of a caregiver (e.g., the subject is hospitalized and is treated by a physician).

### Methods of Treatment or Detection

[0162] In some aspects, the present disclosure provides for methods of treatment using an rAAV virion having any one of the engineered AAV VP capsid polypeptide sequences disclosed herein. In some aspects, the present disclosure provides for methods of detection using an rAAV virion having any one of the engineered AAV VP capsid polypeptide sequences disclosed herein. A method of treatment may comprise administering to a subject an effective amount of a pharmaceutical composition comprising rAAV virions assembled from VP polypeptides comprising a 581-589 region that convers tissue tropism (e.g., CNS tissue tropism or muscle tropism) to the rAAV. The rAAV virions may comprise a VP polypeptide 581-589 region described herein (e.g., comprising a variant 581-589 region that confers tissue tropism or tissue preference). In some embodiments, the rAAV may be assembled from VP capsid polypeptides comprising a 581-589 region of any one of SEQ ID NO: 12-SEQ ID NO: 3937, SEQ ID NO: 3938-SEQ ID NO: 4237, SEQ ID NO: 4238-SEQ ID NO: 4933, SEQ ID NO: 4934-SEQ ID NO: 5233, SEQ ID NO: 5234-SEQ ID NO: 5807, or SEQ ID NO: 5808-SEQ ID NO: 5811. The rAAV virions may encapsidate any payload, including those payloads disclosed herein.

[0163] A method of treatment may comprise administering an rAAV encapsidating a DNA molecule and enriching the DNA in a tissue of interest (e.g., a CNS tissue, a muscle tissue, a cardiac muscle tissue, or a skeletal muscle tissue) with a DNA enrichment that is at least 1-fold, at least 2-fold, at least 3-fold, at least 4-fold, at least 5-fold, at least 10-fold, at least 15-fold, at least 25-fold, at least 30-fold, at least 40-fold, at least 50-fold, at least 100-fold, at least 200-fold, at least 300-fold, at least 500-fold, or at least 1000-fold a DNA enrichment of a wild type AAV9.

[0164] A method of treatment may comprise administering an rAAV encapsidating a DNA molecule and enriching the DNA in a tissue of interest (e.g., a CNS tissue, a muscle tissue, a cardiac muscle tissue, or a skeletal muscle tissue) with a DNA enrichment that is at least 1-fold, at least 2-fold, at least 3-fold, at least 4-fold, at least 5-fold, at least 10-fold, at least 15-fold, at least 25-fold, at least 30-fold, at least 40-fold, at least 50-fold, at least 100-fold, at least 200-fold, at least 300-fold, at least 500-fold, or at least 1000-fold a DNA enrichment of a wild type AAV5.

[0165] A method of treatment may comprise administering an rAAV encapsidating a DNA molecule and expressing an RNA encoded by the DNA in a tissue of interest (e.g., a CNS tissue, a muscle tissue, a cardiac muscle tissue, or a skeletal muscle tissue) with an RNA enrichment that is at least 1-fold, at least 2-fold, at least 3-fold, at least 4-fold, at least 5-fold, at least 10-fold, at least 15-fold, at least 25-fold, at least 30-fold, at least 40-fold, at least 50-fold, at least 100-fold, at least 200-fold, at least 300-fold, at least 500-fold, or at least 1000-fold an RNA enrichment of a wild type AAV9.

[0166] A method of treatment may comprise administering an rAAV encapsidating a DNA molecule and expressing an RNA encoded by the DNA in a tissue of interest (e.g., a CNS tissue, a muscle tissue, a cardiac muscle tissue, or a skeletal muscle tissue) with an RNA enrichment that is at least 1-fold, at least 2-fold, at least 3-fold, at least 4-fold, at least 5-fold, at least 10-fold, at least 15-fold, at least 25-fold, at least 30-fold, at least 40-fold, at least 50-fold, at least 100-fold, at least 200-fold, at least 300-fold, at least 500-fold, or at least 1000-fold an RNA enrichment of a wild type AAV5.

[0167] In some embodiments, the effective amount is at least 1×10⁸ (1e8) viral genomes per dose. In some embodiments, the effective amount is at least 5×10⁸ (5e8) viral genomes/dose, 7.5×10⁸ (7.5e8) viral genomes/dose, at least 1×10⁹ (1e9) viral genomes/dose, at least 2.5×10⁹ (2.5e9) viral genomes/dose, at least 5×10⁹ (5e9) viral genomes/dose. In some embodiments, an effective amount of an rAAV assembled from VP polypeptides comprising a 581-589 region of any one of SEQ ID NO: 12-SEQ ID NO: 3937, SEQ ID NO: 3938-SEQ ID NO: 4237, SEQ ID NO: 4238-SEQ ID NO: 4933, SEQ ID NO: 4934-SEQ ID NO: 5233, SEQ ID NO: 5234-SEQ ID NO: 5807, or SEQ ID NO: 5808-SEQ ID NO: 5811 may be lower than an effective amount of an AAV assembled from VP1, VP2, and VP3 polypeptides of SEQ ID NO: 1, SEQ ID NO: 10, and SEQ ID NO: 11, respectively.

[0168] In some embodiments, the effective amount is at least 1×10¹¹ (1e11) viral genomes/kg patient weight, at least 5×10¹¹ (5e1l) viral genomes/kg, at least 1×10¹² (1e12) viral genomes/kg, at least 5×10¹² (5e12) viral genomes/kg, at least 1×10¹³ (1e13) viral genomes/kg, at least 1×10¹⁴ (1e14) viral genomes/kg, or at least 5×10¹⁴ (5e14). In some embodiments, an effective amount of an rAAV assembled from VP polypeptides comprising a 581-589 region of any one of SEQ ID NO: 12-SEQ ID NO: 3937, SEQ ID NO: 3938-SEQ ID NO: 4237, SEQ ID NO: 4238-SEQ ID NO: 4933, SEQ ID NO: 4934-SEQ ID NO: 5233, SEQ ID NO: 5234-SEQ ID NO: 5807, or SEQ ID NO: 5808-SEQ ID NO: 5811 may be lower than an effective amount of an AAV assembled from VP1, VP2, and VP3 polypeptides of SEQ ID NO: 1, SEQ ID NO: 10, and SEQ ID NO: 11, respectively.

[0169] In some embodiments, the rAAV virion is administered via a systemic administration route including enteral routes of administration and parenteral routes of administration. The rAAV virion may be administered intravenously. In some embodiments, the rAAV may be administered intramuscularly. In some embodiments, the rAAV may be administered intraperitoneally. In some embodiments, the rAAV may be administered topically. In some embodiments, the rAAV may be administered orally. In particular embodiments, the rAAV virion is administered intravenously. In some embodiments, the rAAV is administered intrathecally. In some embodiments, the rAAV is administered by intracerebroventricular injection. In some embodiments, the rAAV is administered by intracerebral ventricular injection. In some embodiments, the rAAV is administered by intracisternal magna administration. In some embodiments, the rAAV is administered by intravitreal injection. In some embodiments, the rAAV is administered by parenchymal injection. In some embodiments, the rAAV is administered by intraparenchymal injection. In some embodiments, the rAAV is administered by intramyocardial injection. In some embodiments, the rAAV is administered by intracoronary injection. In some embodiments, the rAAV is administered by intrapericardial injection. For example, an rAAV virion with CNS tissue tropism may be administered via intrathecal injection, intracisternal magna injection, intracerebroventricular injection, intraparenchymal injection, or intravenous injection. In another example, an rAAV virion with muscle tissue tropism may be administered via intramuscular injection, intracoronary injection, intrapericardial injection, intramyocardial injection, or intravenous injection. In another example, an rAAV virion with cardiac tissue tropism may be administered via intramyocardial injection, intrapericardial injection, intracoronary injection, or intravenous injection.

[0170] In various embodiments, the patient suffers from one of the conditions listed in TABLE 1, below. In particular embodiments, the patient suffers from one of the conditions listed in TABLE 1 and the rAAV includes a payload comprising the transgene product associated therewith in TABLE 1. In some embodiments, an rAAV may be selected to specifically target the primary gene delivery target (e.g., CNS or muscle). For example, an rAAV selected to target the CNS may comprise VP capsid polypeptides comprising a 581-589 region with increased likelihood of conferring CNS tissue tropism (e.g., any one of SEQ ID NO: 12-SEQ ID NO: 3937, SEQ ID NO: 3938-SEQ ID NO: 4237, or SEQ ID NO: 5234-SEQ ID NO: 5807). In another example, an rAAV selected to target muscle may comprise VP capsid polypeptides comprising a 581-589 region with increased likelihood of conferring muscle tropism (e.g., any one of SEQ ID NO: 4238-SEQ ID NO: 4933, SEQ ID NO: 4934-SEQ ID NO: 5233, or SEQ ID NO: 5808-SEQ ID NO: 5811).

[0171] In some embodiments, an rAAV virion of the present disclosure, having any of the engineered AAV VP capsid polypeptide sequences disclosed herein, comprises a vector genome, the vector genome comprising a therapeutic polynucleotide or payload. In further embodiments, said payload may be under control of regulatory sequences that direct expression in infected human cells. In some embodiments, the payload comprises a therapeutic polynucleotide encoding any genetically encodable payload, such as an RNA (e.g., a guide RNA), a suppressor tRNA, a transgene, or a genome modifying entity. In some embodiments, the payload may be under control of a promoter. The promoter may be a ubiquitous promoter, or the promoter may be cell or tissue specific. For example, a payload may be under control of a neuronal promoter for expression in neurons. In another example, a payload may be under control of a muscle promoter for expression in muscle cells.

[0172] In some embodiments, the therapeutic polynucleotide encodes a guide RNA, a tRNA, a suppressor tRNA, a siRNA, a miRNA, an mRNA, a shRNA, a circular RNA, or an antisense oligonucleotide (ASO), a ribozyme, a DNAzyme, an aptamer, or any combination thereof. In some embodiments, the therapeutic polynucleotide encodes a linear therapeutic polynucleotide or a circular therapeutic polynucleotide.

[0173] In some embodiments, the therapeutic polynucleotide is a transgene, encoding a therapeutic protein. In particular embodiments, the transgene encodes a protein selected from the targets suitable for modification or transgene products of TABLE 1. In some embodiments, a transgene encoding a CNS target is encapsidated by an rAAV comprising VP capsid polypeptides comprising a 581-589 region with increased likelihood of conferring CNS tissue tropism or preference (e.g., any one of SEQ ID NO: 12-SEQ ID NO: 3937, SEQ ID NO: 3938-SEQ ID NO: 4237, or SEQ ID NO: 5234-SEQ ID NO: 5807). In some embodiments, a transgene encoding a muscle target is encapsidated by an rAAV comprising VP capsid polypeptides comprising a 581-589 region with increased likelihood of conferring muscle tropism or preference (e.g., any one of SEQ ID NO: 4238-SEQ ID NO: 4933, SEQ ID NO: 4934-SEQ ID NO: 5233, or SEQ ID NO: 5808-SEQ ID NO: 5811).

TABLE 1
Suitable Therapeutic Targets

| Primary Gene | | Target of a Therapeutic |
|---|---|---|
| Delivery Target | Condition | Polynucleotide |
| Brain/CNS | AADC deficiency | AADC |
| | Alzheimer's Disease | Multiple, including APP, SNCA, |
| | | MAPT, ApoE, NGF, TERT |
| | Tauopathies | MAPT |
| | Synucleinopathies | SNCA |
| | Batten disease (CLN2) | CLN2 |
| | Batten disease (CLN3) | CLN3 |
| | Batten disease (CLN6) | CLN6 |
| | MPS-IIIB | NAGLU |
| | Frontotemporal dementia with GRN | GRN |
| | mutations (FTD-GRN) | |
| | Parkinson's Disease with GBA1 mutations | GBA1 |
| | (PD-GBA) and neuronpathic Gaucher's | |
| | disease | |
| | Corticobasal Degeneration (CBD) | MAPT |
| | Progressive Supranuclear Palsy (PSP) | MAPT |
| | Chronic Traumatic Encephalopathy (CTE) | MAPT |
| | Synucleinopathies | GBA1 + alpha-synuclein |
| | Gaucher disease type 2 | GBA |
| | Canavan Disease | ASPA |
| | Parkinson disease | AADC |
| | Parkinson disease | GDNF |
| | Parkinson disease | Neurturin |
| | Parkinson disease | GAD |
| | Parkinson disease | NTN |
| | Parkinson disease | hFOXG1 |
| | Parkinson disease | hKCNQ2 |
| | Parkinson disease | hFMR1 |
| | Parkinson disease | anti-Tau/miRNA |
| | Parkinson disease | EPM2A or EPM2B |
| | Parkinson disease | LRRK2 |
| | Parkinson's Disease | LRRK2 |
| | Parkinson's Disease | SNCA |
| | Tay-Sachs Disease | HEXA |
| | Huntington's disease | IT15 |
| | Huntington's disease | CYP46A1 |
| | Huntington's disease | HTT |
| | Protocki-Lupski Syndrome | IT15 |
| | Amyotrophic lateral sclerosis | C9orf72 |
| | Amyotrophic lateral sclerosis | SOD1 |
| | Down syndrome | DYRK1A |
| | Sanfilippo disease type A | SGSH |
| | Sanfilippo disease type B | hNAGLU |
| | (Nervous system) | HEXB and HEXA |
| | (Nervous system) | human codon-optimized CLN1 |
| | | complementary DNA |
| | (Nervous system) | SURF1 |
| | (Nervous system) | anti-UBE3A-ATS shRNA |
| | (Nervous system) | hSLC6A1 |
| | Rett syndrome | MECP2 |
| Muscle | Charcot-Marie-Tooth disease type 1A | NTF3 |
| | (CMT1A) | |
| | Duchenne muscular dystrophy (DMD) | Micro-dystrophin |
| | Duchenne muscular dystrophy (DMD) | Mini-dystrophin |
| | Facioscapulohumeral muscular dystrophy- | DUX4 |
| | 1 (FSHD) | |
| | Dysferlinopathy | DYSF |
| | Pompe disease | GAA |
| | Limb-girdle muscular dystrophies (LGMD) | FKRP |
| | (2i/R9) | |
| | Duchenne muscular dystrophy (DMD) | DMD |
| | Facioscapulohumeral Dystrophy | DUX4 |
| | Myotonic Dystrophy | DMPK |
| | Glycogen storage disorders | anti-GYS1 miRNA |
| | X-linked myotubular myopathy (X-linked | MTM1 |
| | MTM) | |
| | euchromatic histone-lysine N- | anti-EHMT2 shRNA |
| | methyltransferase 2 | |

[0174] In some embodiments, the therapeutic polynucleotide encodes a therapeutic RNA. In some embodiments the therapeutic polynucleotide encodes an RNA, such as a guide RNA (including an engineered or synthetic guide RNA) for genome editing or for RNA editing. The guide RNA may target a gene, such as those provided in TABLE 1 or encoding a protein nucleotide provided in TABLE 1, to promote editing of the target gene. In some embodiments, editing of the target gene may treat a condition in a subject, such as a condition provided in TABLE 1.

[0175] In some embodiments, the therapeutic polynucleotide encodes a tRNA or a modified tRNA (engineered or synthetic tRNA). For example, the tRNA or modified tRNA can be a suppressor tRNA. The suppressor tRNA can be engineered to have an anticodon region that recognizes a stop codon, such as any premature stop codon (opal, ochre, or amber stop codons). A suppressor tRNA may target a premature stop codon in a gene, such as those provided in TABLE 1 or encoding a protein nucleotide provided in TABLE 1, to promote readthrough of the gene. In some embodiments, suppressing the premature stop codon may treat a condition in a subject, such as a condition provided in TABLE 1.

[0176] In some embodiments, the therapeutic polynucleotide (e.g., a therapeutic RNA, a tRNA, or a genome modifying entity) can target a gene listed in TABLE 1 or any gene associated with a neurologic disease, Parkinson's disease, Alzheimer's disease, a Tauopathy, Stargardt disease, alpha-1 antitrypsin deficiency, Duchenne's muscular dystrophy, Rett syndrome, cystic fibrosis, or any genetic disease. In some embodiments, the targeted gene may be ABCA4, AAT, SERPINA1, SERPINA1 E342K, HEXA, LRRK2, SNCA, DMD, APP, Tau, GBA, PINK1, RAB7A, CFTR, ALAS1, ATP7B, ATP7B G1226R, HFE C282Y, LIPA c.894 G>A, PCSK9 start site, or SCNN1A start site, a fragment any of these, or any combination thereof. In some embodiments, the therapeutic polynucleotide is a gene therapy payload (e.g., a transgene) and, thus, may itself be one of the genes listed in TABLE 1 or any gene associated with a neurologic disease, Parkinson's disease, Alzheimer's disease, a Tauopathy, Stargardt disease, alpha-1 antitrypsin deficiency, Duchenne's muscular dystrophy, Rett syndrome, cystic fibrosis, or any genetic disease. In some embodiments, the transgene may be ABCA4, AAT, SERPINA1, SERPINA1 E342K, HEXA, LRRK2, SNCA, DMD, APP, Tau, GBA, PINK1, RAB7A, CFTR, ALAS1, ATP7B, ATP7B G1226R, HFE C282Y, LIPA c.894 G>A, PCSK9 start site, or SCNN1A start site, a fragment any of these, or any combination thereof.

[0177] An engineered AAV comprising a VP capsid polypeptide comprising a CNS tissue-tropic 581-589 region may be used to deliver a payload to treat a neurological condition, or a condition of the central nervous system. For example, an engineered AAV comprising a VP capsid polypeptide comprising a 581-589 region of any one of SEQ ID NO: 12-SEQ ID NO: 3937 or SEQ ID NO: 3938-SEQ ID NO: 4237 may be used to treat a neurological condition (e.g., an aromatic l-amino acid decarboxylase (AADC) deficiency, Alzheimer's disease, a tauopathy, a synucleinopathy, Batten disease, mucopolysaccharidosis type III, frontotemporal dementia, Parkinson's disease, Gaucher disease, Canavan disease, Tay-Sachs disease, Huntington's disease, Protocki-Lupski syndrome, amyotrophic lateral sclerosis, Down syndrome, Sanfilippo disease type A, Sanfilippo disease type B, or Rett syndrome). In some embodiments, the engineered AAV comprising a VP capsid polypeptide comprising a CNS tissue-tropic 581-589 region may be used to deliver a transgene encoding a protein associated with a neurological condition (e.g., aromatic l-amino acid decarboxylase (AADC), amyloid precursor protein (APP), α-synuclein, microtubule associated protein tau (MAPT), ApoE, nerve growth factor (NGF), telomerase reverse transcriptase (TERT), CLN2, CLN3, CLN6, N-acetyl-α-glucosaminidase (NAGLU), granulin, glucosylceramidase 13 (GBA), aspartoacylase, GDNF, neurturin (NTN), glutamate decarboxylase (GAD), FOXG1, Kᵥ7.2, laforin, leucine rich repeat kinase 2 (LRRK2), hexosaminidase A (HEXA), hexosaminidase B (HEXB), huntingtin, cholesterol 24-hydroxylase, C9orf72, superoxide dismutase 1 (SOD1), dual specificity tyrosine-phosphorylation-regulated kinase 1A (DYRKA1), N-sulfoglucosamine sulfohydrolase (SGSH), surfeit locus protein 1 (SURF1), GABA transporter 1 (GAT1), and methyl-CpG binding protein 2 (MECP2)). In some embodiments, the engineered AAV comprising a VP capsid polypeptide comprising a CNS tissue-tropic 581-589 region may be used to deliver a therapeutic polynucleotide that alters expression or promotes editing of a gene encoding a protein associated with a neurological condition (e.g., aromatic l-amino acid decarboxylase (AADC), amyloid precursor protein (APP), α-synuclein, microtubule associated protein tau (MAPT), ApoE, nerve growth factor (NGF), telomerase reverse transcriptase (TERT), CLN2, CLN3, CLN6, N-acetyl-α-glucosaminidase (NAGLU), granulin, glucosylceramidase 13 (GBA), aspartoacylase, GDNF, neurturin (NTN), glutamate decarboxylase (GAD), FOXG1, Kᵥ7.2, laforin, leucine rich repeat kinase 2 (LRRK2), hexosaminidase A (HEXA), hexosaminidase B (HEXB), huntingtin, cholesterol 24-hydroxylase, C9orf72, superoxide dismutase 1 (SOD1), dual specificity tyrosine-phosphorylation-regulated kinase 1A (DYRKA1), N-sulfoglucosamine sulfohydrolase (SGSH), surfeit locus protein 1 (SURF1), GABA transporter 1 (GAT1), and methyl-CpG binding protein 2 (MECP2)).

[0178] An engineered AAV comprising a VP capsid polypeptide comprising a muscle-tropic 581-589 region may be used to deliver a payload to treat a muscular condition. For example, an engineered AAV comprising a VP capsid polypeptide comprising a 581-589 region of any one of SEQ ID NO: 4238-SEQ ID NO: 4933 or SEQ ID NO: 4934-SEQ ID NO: 5233 may be used to treat a muscular condition (e.g., Charcot-Marie-Tooth disease, Duchenne muscular dystrophy, dysferlinopathy, Pompe disease, Limb-girdle muscular dystrophies, facioscapulohumeral dystrophy, myotonic dystrophy, a glycogen storage disorder, X-linked myotubular myopathy, or euchromatic histone-lysine N-methyltransferase 2). In some embodiments, the engineered AAV comprising a VP capsid polypeptide comprising a muscle-tropic 581-589 region may be used to deliver a transgene encoding a protein associated with a muscular condition (e.g., neurotrophin 3 (NFT3), dystrophin, mini-dystrophin, micro-dystrophin, dysferlin, acid α-glucosidase (GAA), fukutin-related protein (FKRP), double homeobox 4 (DUX4), glycogen synthase 1 (GYS1), myotubularin, or euchromatic histone-lysine N-methyltransferase 2 (EHMT2)). In some embodiments, the engineered AAV comprising a VP capsid polypeptide comprising a muscle-tropic 581-589 region may be used to deliver a therapeutic polynucleotide that alters expression or promotes editing of a gene encoding a protein associated with a muscular condition (e.g., neurotrophin 3 (NFT3), dystrophin, mini-dystrophin, micro-dystrophin, dysferlin, acid α-glucosidase (GAA), fukutin-related protein (FKRP), double homeobox 4 (DUX4), glycogen synthase 1 (GYS1), myotubularin, or euchromatic histone-lysine N-methyltransferase 2 (EHMT2)).

[0179] In some embodiments, the therapeutic polynucleotide encodes genome modifying entities. For example, a genome modifying entity may be a DNA editing enzyme, an RNA editing enzyme, a transcriptional activator, or a transcriptional repressor. The DNA editing enzyme may be any DNA editing enzyme, including any CRISPR/Cas systems, meganucleases, zinc-finger nucleases, (ZFNs), TALE Nucleases (TALENs and megaTALENS). The CRISPR/Cas system can be a Cas3, Cas8, Cas10, Cas9, Cas4, Cas12, or Cas13. The RNA editing enzyme may be ADAR. In some embodiments, the ADAR is a human ADAR1 or human ADAR2. The transcriptional activator may be VP64. A transcriptional repressor may be KRAB. Such genome modifying entities may target any gene listed in TABLE 1 for editing.

[0180] In some embodiments, the present disclosure provides for rAAV virions having an engineered AAV VP capsid polypeptide (e.g., comprising a 581-589 region variant), where the virion encapsidates any one of or any combination of the therapeutic payloads disclosed herein. In some embodiments, multiple copies of the therapeutic payload are encapsidated.

[0181] In some embodiments, the therapeutic polynucleotide is a polynucleotide capable of serving as a homology template for homology-directed repair. In some embodiments, the therapeutic polynucleotide may be a guide polynucleotide for a CRISPR/Cas system or an ADAR enzyme. For example, the therapeutic polynucleotide may be a CRISPR/Cas guide RNA or an ADAR guide RNA.

[0182] In some embodiments, an rAAV virion of the present disclosure, having any of the engineered AAV VP capsid polypeptide sequences disclosed herein, comprises a vector genome, the vector genome comprising a detectable polynucleotide or payload. In further embodiments, said payload may be under control of regulatory sequences that direct expression in infected human cells. Examples of detectable polynucleotides include, but are not limited to, any genetically encodable detectable moiety. For example, a genetically encodable detectable moiety may be a fluorescent protein such as EGFP, GFP, YFP, RFP, CFP, or any variants thereof. In some embodiments, the present disclosure provides for rAAV virions having an engineered AAV VP capsid polypeptide, where the virion encapsidates any one of or any combination of the detectable payloads disclosed herein. In some embodiments, multiple copies of the detectable payload are encapsidated.

[0183] In some embodiments, the present disclosure provides for rAAV virions having an engineered AAV VP capsid polypeptide, where the virion encapsidates any one of or any combination of the therapeutic payloads and detectable payloads disclosed herein. For example, an rAAV of the present disclosure having an engineered AAV VP capsid polypeptide may encapsidate a transgene and a fluorescent protein. As another example, an rAAV of the present disclosure having an engineered AAV VP capsid polypeptide may encapsidate a therapeutic RNA (e.g., a guide RNA) and a fluorescent protein.

[0184] Delivering a payload (e.g., a payload encoding a therapeutic polypeptide or a therapeutic polynucleotide) using the CNS specific or muscle specific AAVs described herein may produce lower toxicity in a subject compared to non-specific AAVs (e.g., AAVs comprising a VP1 polypeptide of SEQ ID NO: 1). Tissue specific AAVs (e.g., CNS specific AAVs or muscle specific AAVs) may be effective at lower doses compared to non-specific AAVs since a larger fraction of the administered AAVs infect the relevant tissue (e.g., CNS tissue or muscle tissue). As a result, a therapeutically effective dose of tissue specific AAVs may be lower than a therapeutically effect dose of non-specific AAVs, leading to lower toxicity due administering a lower dose. For example, administration of a therapeutically effective dose of tissue specific AAVs may result in lower liver toxicity than administration of a therapeutically effective dose of non-specific AAVs. Administration of a lower dose may also lead to lower production of neutralizing antibodies in the subject. Neutralizing antibodies may decrease the efficacy of the AAV therapy by inhibiting infection of the target tissue or may cause severe side effects in the subject due to the immune response. Additionally, tissue specific AAVs (e.g., CNS specific AAVs or muscle specific AAVs) may produce fewer off-target effects compared to non-specific AAVs when administered at the same dose since fewer of the AAVs infect off target tissues (e.g., non-CNS tissues or non-muscle tissues). Off-target effects may include increased gene expression in an off-target tissue, decreased gene expression in an off-target tissue, gene editing in an off-target tissue, immune response, or liver toxicity.

### In Vivo Selected VP Polypeptides

[0185] In a further aspect, engineered (synonymously, recombinant) adeno-associated virus (AAV) VP capsid polypeptides identified using the methods described herein are provided.

[0186] In some embodiments, the engineered adeno-associated virus (AAV) viral protein (VP) capsid polypeptide has an amino acid sequence at least 70% identical to SEQ ID NO: 1, wherein the engineered AAV VP capsid polypeptide has at least one substitution as compared to SEQ ID NO: 1 in the 581-589 region, corresponding to residue 581 to residue 589 of SEQ ID NO: 1, inclusive, wherein the capsid polypeptide is capable of assembling into a recombinant AAV virion (rAAV), and wherein the VP capsid polypeptide does not have the sequence of any of SEQ ID NO: 3, SEQ ID NO: 4, SEQ ID NO: 5, SEQ ID NO: 6, SEQ ID NO: 7, or SEQ ID NO: 8. In some embodiments, the VP capsid polypeptide comprises a variant 581-589 region (e.g., comprising one or more amino acid substitutions relative to SEQ ID NO: 1 in the region from residue 581 to residue 589, inclusive). The VP capsid polypeptide may comprise a sequence of SEQ ID NO: 2, wherein the 581-589 region has a sequence of any one of SEQ ID NO: 12-SEQ ID NO: 3937, SEQ ID NO: 3938-SEQ ID NO: 4237, SEQ ID NO: 4238-SEQ ID NO: 4933, SEQ ID NO: 4934-SEQ ID NO: 5233, SEQ ID NO: 5234-SEQ ID NO: 5807, or SEQ ID NO: 5808-SEQ ID NO: 5811.

[0187] In some embodiments, the engineered adeno-associated virus (AAV) viral protein (VP) capsid polypeptide is CNS tissue-tropic and has an amino acid sequence at least 70% identical to SEQ ID NO: 1, wherein the engineered AAV VP capsid polypeptide has at least one substitution as compared to SEQ ID NO: 1 in the 581-589 region, corresponding to residue 581 to residue 589 of SEQ ID NO: 1, inclusive, wherein the capsid polypeptide is capable of assembling into a recombinant AAV virion (rAAV), wherein the at least one substitution confers higher tropism for a central nervous system (CNS) tissue on the rAAV as compared to an rAAV virion having an AAV5 VP capsid polypeptide of SEQ ID NO: 1, and wherein the VP capsid polypeptide does not have the sequence of any of SEQ ID NO: 3, SEQ ID NO: 4, SEQ ID NO: 5, SEQ ID NO: 6, SEQ ID NO: 7, or SEQ ID NO: 8. In some embodiments, the CNS-tropic VP capsid polypeptide comprises a variant 581-589 region (e.g., comprising one or more amino acid substitutions relative to SEQ ID NO: 1 in the region from residue 581 to residue 589, inclusive). The CNS-tropic VP capsid polypeptide may comprise a sequence of SEQ ID NO: 2, wherein the 581-589 region has a sequence of any one of SEQ ID NO: 12-SEQ ID NO: 3937, SEQ ID NO: 3938-SEQ ID NO: 4237, or SEQ ID NO: 5234-SEQ ID NO: 5807.

[0188] In some embodiments, the engineered adeno-associated virus (AAV) viral protein (VP) capsid polypeptide is muscle-tropic and has an amino acid sequence at least 70% identical to SEQ ID NO: 1, wherein the engineered AAV VP capsid polypeptide has at least one substitution as compared to SEQ ID NO: 1 in the 581-589 region, corresponding to residue 581 to residue 589 of SEQ ID NO: 1, inclusive, wherein the capsid polypeptide is capable of assembling into a recombinant AAV virion (rAAV), wherein the at least one substitution confers higher tropism for a muscle tissue on the rAAV as compared to an rAAV virion having an AAV5 VP capsid polypeptide of SEQ ID NO: 1, and wherein the VP capsid polypeptide does not have the sequence of any of SEQ ID NO: 3, SEQ ID NO: 4, SEQ ID NO: 5, SEQ ID NO: 6, SEQ ID NO: 7, or SEQ ID NO: 8. In some embodiments, the muscle-tropic VP capsid polypeptide comprises a variant 581-589 region (e.g., comprising one or more amino acid substitutions relative to SEQ ID NO: 1 in the region from residue 581 to residue 589, inclusive). The muscle-tropic VP capsid polypeptide may comprise a sequence of SEQ ID NO: 2, wherein the 581-589 region has a sequence of any one of SEQ ID NO: 4238-SEQ ID NO: 4933, SEQ ID NO: 4934-SEQ ID NO: 5233, or SEQ ID NO: 5808-SEQ ID NO: 5811.

[0189] In particular embodiments, the engineered adeno-associated virus (AAV) viral protein (VP) capsid polypeptide (e.g., a CNS tissue-tropic VP capsid polypeptide or a muscle-tropic VP capsid polypeptide) has an amino acid sequence at least 75%, 80%, 85%, 90%, 91%, 92%, 93%, 94%, 95%, 96%, 97%, 98% identical to the sequence of SEQ ID NO: 1.

[0190] In some embodiments, the AAV VP capsid polypeptide has an amino acid sequence of SEQ ID NO: 2, wherein X¹, X², X³, X⁴, X⁵, X⁶, X⁷, X⁸, and X⁹ are each independently selected from any amino acid, wherein the capsid polypeptide is capable of assembling into a recombinant AAV virion (rAAV), and wherein the VP capsid polypeptide does not have the sequence of any of SEQ ID NO: 3, SEQ ID NO: 4, SEQ ID NO: 5, SEQ ID NO: 6, SEQ ID NO: 7, or SEQ ID NO: 8, optionally with further mutations elsewhere in the VP capsid polypeptide. In some embodiments, the X¹X²X³X⁴X⁵X⁶X⁷X⁸X⁹ portion corresponds to a sequence selected from any one of SEQ ID NO: 12-SEQ ID NO: 3937, SEQ ID NO: 3938-SEQ ID NO: 4237, SEQ ID NO: 4238-SEQ ID NO: 4933, SEQ ID NO: 4934-SEQ ID NO: 5233, SEQ ID NO: 5234-SEQ ID NO: 5807, or SEQ ID NO: 5808-SEQ ID NO: 5811.

[0191] In some embodiments, the AAV VP capsid polypeptide is a CNS tissue-tropic capsid polypeptide and has an amino acid sequence of SEQ ID NO: 2, wherein X¹, X², X³, X⁴, X⁵, X⁶, X⁷, X⁸, and X⁹ are each independently selected from any amino acid, wherein the capsid polypeptide is capable of assembling into a recombinant AAV virion (rAAV), wherein the at least one substitution confers higher tropism for a central nervous system (CNS) tissue on the rAAV as compared to an rAAV virion having an AAV5 VP capsid polypeptide of SEQ ID NO: 1, and wherein the VP capsid polypeptide does not have the sequence of any of SEQ ID NO: 3, SEQ ID NO: 4, SEQ ID NO: 5, SEQ ID NO: 6, SEQ ID NO: 7, or SEQ ID NO: 8, optionally with further mutations elsewhere in the VP capsid polypeptide. In some embodiments, X¹X²X³X⁴X⁵X⁶X⁷X⁸X⁹ of the CNS tissue-tropic VP capsid polypeptide correspond to a sequence of any one of SEQ ID NO: 12-SEQ ID NO: 3937, SEQ ID NO: 3938-SEQ ID NO: 4237, or SEQ ID NO: 5234-SEQ ID NO: 5807.

[0192] In some embodiments, the AAV VP capsid polypeptide is a muscle-tropic capsid polypeptide and has an amino acid sequence of SEQ ID NO: 2, wherein X¹, X², X³, X⁴, X⁵, X⁶, X⁷, X⁸, and X⁹ are each independently selected from any amino acid, wherein the capsid polypeptide is capable of assembling into a recombinant AAV virion (rAAV), wherein the at least one substitution confers higher tropism for a muscle tissue on the rAAV as compared to an rAAV virion having an AAV5 VP capsid polypeptide of SEQ ID NO: 1, and wherein the VP capsid polypeptide does not have the sequence of any of SEQ ID NO: 3, SEQ ID NO: 4, SEQ ID NO: 5, SEQ ID NO: 6, SEQ ID NO: 7, or SEQ ID NO: 8, optionally with further mutations elsewhere in the VP capsid polypeptide. In some embodiments, X¹X²X³X⁴X⁵X⁶X⁷X⁸X⁹ of the muscle-tropic VP capsid polypeptide correspond to a sequence of any one of SEQ ID NO: 4238-SEQ ID NO: 4933, SEQ ID NO: 4934-SEQ ID NO: 5233, or SEQ ID NO: 5808-SEQ ID NO: 5811.

[0193] In some embodiments, the engineered adeno-associated virus (AAV) viral protein (VP) capsid polypeptide (e.g., a CNS tissue-tropic VP capsid polypeptide or a muscle-tropic VP capsid polypeptide) has an amino acid sequence of SEQ ID NO: 2, wherein amino acid residues X¹, X², X³, X⁴, X⁵, X⁶, X⁷, X⁸, and X⁹ are each independently selected from A, R, N, D, C, E, Q, G, H, I, L, K, M, F, P, S, T, W, Y, and V; wherein the engineered AAV VP capsid polypeptide is capable of assembling into a recombinant AAV virion (rAAV); and wherein the rAAV VP capsid polypeptide does not have the sequence of any of SEQ ID NO: 1, SEQ ID NO: 3, SEQ ID NO: 4, SEQ ID NO: 5, SEQ ID NO: 6, SEQ ID NO: 7, or SEQ ID NO: 8.

[0194] In some embodiments, the 581-589 region of the engineered VP capsid polypeptide, corresponding to residues 581 to 589, inclusive, with reference to SEQ ID NO: 1, has a sequence that is at least 70%, at least 75%, at least 80%, at least 85%, at least 90%, at least 91%, at least 92%, at least 93%, at least 94%, at least 95%, at least 96%, at least 97%, at least 98%, or at least 99% identical to any one of SEQ ID NO: 12-SEQ ID NO: 3937, SEQ ID NO: 3938-SEQ ID NO: 4237, SEQ ID NO: 4238-SEQ ID NO: 4933, SEQ ID NO: 4934-SEQ ID NO: 5233, SEQ ID NO: 5234-SEQ ID NO: 5807, or SEQ ID NO: 5808-SEQ ID NO: 5811. In some embodiments, the 581-589 region of the engineered VP capsid polypeptide comprises 1 amino acid substitution relative to any one of SEQ ID NO: SEQ ID NO: 12-SEQ ID NO: 3937, SEQ ID NO: 3938-SEQ ID NO: 4237, SEQ ID NO: 4238-SEQ ID NO: 4933, SEQ ID NO: 4934-SEQ ID NO: 5233, SEQ ID NO: 5234-SEQ ID NO: 5807, or SEQ ID NO: 5808-SEQ ID NO: 5811. In some embodiments, the 581-589 region of the engineered VP capsid polypeptide comprises 2 amino acid substitutions relative to any one of SEQ ID NO: SEQ ID NO: 12-SEQ ID NO: 3937, SEQ ID NO: 3938-SEQ ID NO: 4237, SEQ ID NO: 4238-SEQ ID NO: 4933, SEQ ID NO: 4934-SEQ ID NO: 5233, SEQ ID NO: 5234-SEQ ID NO: 5807, or SEQ ID NO: 5808-SEQ ID NO: 5811. In particular embodiments, the 581-589 region of the engineered VP capsid polypeptide has a sequence that is identical to any one of SEQ ID NO: SEQ ID NO: 12-SEQ ID NO: 3937, SEQ ID NO: 3938-SEQ ID NO: 4237, SEQ ID NO: 4238-SEQ ID NO: 4933, SEQ ID NO: 4934-SEQ ID NO: 5233, SEQ ID NO: 5234-SEQ ID NO: 5807, or SEQ ID NO: 5808-SEQ ID NO: 5811.

[0195] In some embodiments, the engineered adeno-associated virus (AAV) viral protein (VP) capsid polypeptide is an engineered AAV5 viral capsid protein, wherein the engineered AAV VP5 capsid polypeptide has at least one substitution as compared to SEQ ID NO: 1 in the 581-589 region, corresponding to residues 581 to 589, inclusive, of SEQ ID NO: 1, inclusive; wherein the capsid polypeptide is capable of assembling into a recombinant AAV virion (rAAV); wherein the at least one substitution confers higher tropism for a central nervous system (CNS) tissue on the rAAV as compared to an rAAV virion having an AAV5 VP capsid polypeptide of SEQ ID NO: 1, and wherein the VP capsid polypeptide does not have the sequence of any of SEQ ID NO: 3, SEQ ID NO: 4, SEQ ID NO: 5, SEQ ID NO: 6, SEQ ID NO: 7, or SEQ ID NO: 8, optionally with further mutations elsewhere in the VP protein.

[0196] In some embodiments, the AAV VP capsid polypeptides have an amino acid sequence of SEQ ID NO: 2, wherein X¹, X², X³, X⁴, X⁵, X⁶, X⁷, X⁸, and X⁹ are each independently selected from A, R, N, D, C, E, Q, G, H, I, L, K, M, F, P, S, T, W, Y, and V; and wherein the polypeptide does not have the sequence of any of SEQ ID NO: 1, SEQ ID NO: 3, SEQ ID NO: 4, SEQ ID NO: 5, SEQ ID NO: 6, SEQ ID NO: 7, or SEQ ID NO: 8.

[0197] In some embodiments, the engineered AAV VP capsid polypeptide comprises a polypeptide sequence represented by the formula: (A)-(X)—(B), wherein: (A) is the polypeptide sequence of SEQ ID NO: 5812 (VAYNVGGQMATNNQSSTTAP, corresponding to residues 561 to 580 of SEQ ID NO: 2); (X) is the 581-589 region having a polypeptide sequence comprising amino acid residues X¹, X², X³, X⁴, X⁵, X⁶, X⁷, X⁸, and X⁹ of SEQ ID NO: 2; and (B) is the polypeptide sequence of SEQ ID NO: 5813 (IVPGSVWMERDVYLQGPIWA, corresponding to residues 590 to 609 of SEQ ID NO: 2); wherein X¹, X², X³, X⁴, X⁵, X⁶, X⁷, X⁸, and X⁹ are each independently selected from A, R, N, D, C, E, Q, G, H, I, L, K, M, F, P, S, T, W, Y, and V; and wherein the capsid polypeptide is capable of assembling into a recombinant AAV virion (rAAV); and wherein the polypeptide does not have the sequence of any of SEQ ID NO: 1, SEQ ID NO: 3, SEQ ID NO: 4, SEQ ID NO: 5, SEQ ID NO: 6, SEQ ID NO: 7, and SEQ ID NO: 8.

[0198] In some embodiments, the engineered AAV VP capsid polypeptide comprises a polypeptide sequence represented by the formula: (A)-(X)—(B) wherein: (A) is the polypeptide sequence of SEQ ID NO: 5812 (VAYNVGGQMATNNQSSTTAP, corresponding to residues 561 to 580 of SEQ ID NO: 2); (X) is the 581-589 region having a polypeptide sequence selected from the list of polypeptides in TABLE 9 that is expected to confer CNS tissue tropism or preference on a recombinant AAV virion (rAAV), based on a secondary screen; and (B) is the polypeptide sequence of SEQ ID NO: 5813 (IVPGSVWMERDVYLQGPIWA, corresponding to residues 590 to 609 of SEQ ID NO: 2); and wherein the capsid polypeptide is capable of assembling into the rAAV and, the capsid does not have the sequence of any of SEQ ID NO: 1, SEQ ID NO: 3, SEQ ID NO: 4, SEQ ID NO: 5, SEQ ID NO: 6, SEQ ID NO: 7, or SEQ ID NO: 8. Also encompassed herein are rAAVs composed of engineered AAV5 VP2 capsid polypeptides and engineered AAV5 VP3 capsid polypeptides comprising a 581-589 region having a sequence selected from the list of polypeptides in TABLE 9 at the region corresponding to amino acid residues 445 to 453 in AAV5 VP2 or the region corresponding to amino acid residues 389 to 397 in AAV5 VP3.

[0199] In some embodiments, a 581-589 region of an AAV5 VP capsid polypeptide has a sequence that is at least 75%, at least 77.7%, at least 85%, at least 88.8%, or 100% identical to a sequence provided in TABLE 9. In some embodiments, a 581-589 region of an AAV5 VP capsid polypeptide has a sequence that is at least 75%, at least 77.7%, at least 85%, at least 88.8% or 100% identical to SEQ ID NO: 18. In some embodiments, a 581-589 region of an AAV5 VP capsid polypeptide has a sequence that is at least 75%, at least 77.7%, at least 85%, at least 88.8% or 100% identical to SEQ ID NO: 3472. In some embodiments, a 581-589 region of an AAV5 VP capsid polypeptide has a sequence that is at least 75%, at least 77.7%, at least 85%, at least 88.8% or 100% identical to SEQ ID NO: 262. In some embodiments, a 581-589 region of an AAV5 VP capsid polypeptide has a sequence that is at least 75%, at least 77.7%, at least 85%, at least 88.8% or 100% identical to SEQ ID NO: 3306. In some embodiments, a 581-589 region of an AAV5 VP capsid polypeptide has a sequence that is at least 75%, at least 77.7%, at least 85%, at least 88.8% or 100% identical to SEQ ID NO: 2028. In some embodiments, a 581-589 region of an AAV5 VP capsid polypeptide has a sequence that is at least 75%, at least 77.7%, at least 85%, at least 88.8% or 100% identical to SEQ ID NO: 2791. In some embodiments, a 581-589 region of an AAV5 VP capsid polypeptide has a sequence that is at least 75%, at least 77.7%, at least 85%, at least 88.8% or 100% identical to SEQ ID NO: 424. In some embodiments, a 581-589 region of an AAV5 VP capsid polypeptide has a sequence that is at least 75%, at least 77.7%, at least 85%, at least 88.8% or 100% identical to SEQ ID NO: 2536. In some embodiments, a 581-589 region of an AAV5 VP capsid polypeptide has a sequence that is at least 75%, at least 77.7%, at least 85%, at least 88.8% or 100% identical to SEQ ID NO: 1971. In some embodiments, a 581-589 region of an AAV5 VP capsid polypeptide has a sequence that is at least 75%, at least 77.7%, at least 85%, at least 88.8% or 100% identical to SEQ ID NO: 415. In some embodiments, a 581-589 region of an AAV5 VP capsid polypeptide has a sequence that is at least 75%, at least 77.7%, at least 85%, at least 88.8% or 100% identical to SEQ ID NO: 3846. In some embodiments, a 581-589 region of an AAV5 VP capsid polypeptide has a sequence that is at least 75%, at least 77.7%, at least 85%, at least 88.8% or 100% identical to SEQ ID NO: 3283. In some embodiments, a 581-589 region of an AAV5 VP capsid polypeptide has a sequence that is at least 75%, at least 77.7%, at least 85%, at least 88.8% or 100% identical to SEQ ID NO: 1956. In some embodiments, a 581-589 region of an AAV5 VP capsid polypeptide has a sequence that is at least 75%, at least 77.7%, at least 85%, at least 88.8% or 100% identical to SEQ ID NO: 3297. In some embodiments, a 581-589 region of an AAV5 VP capsid polypeptide has a sequence that is at least 75%, at least 77.7%, at least 85%, at least 88.8% or 100% identical to SEQ ID NO: 4545. In some embodiments, a 581-589 region of an AAV5 VP capsid polypeptide has a sequence that is at least 75%, at least 77.7%, at least 85%, at least 88.8% or 100% identical to SEQ ID NO: 2661. In some embodiments, a 581-589 region of an AAV5 VP capsid polypeptide has a sequence that is at least 75%, at least 77.7%, at least 85%, at least 88.8% or 100% identical to SEQ ID NO: 1576. In some embodiments, a 581-589 region of an AAV5 VP capsid polypeptide has a sequence that is at least 75%, at least 77.7%, at least 85%, at least 88.8% or 100% identical to SEQ ID NO: 425. In some embodiments, a 581-589 region of an AAV5 VP capsid polypeptide has a sequence that is at least 75%, at least 77.7%, at least 85%, at least 88.8% or 100% identical to SEQ ID NO: 709. In some embodiments, a 581-589 region of an AAV5 VP capsid polypeptide has a sequence that is at least 75%, at least 77.7%, at least 85%, at least 88.8% or 100% identical to SEQ ID NO: 2168. In some embodiments, a 581-589 region of an AAV5 VP capsid polypeptide has a sequence that is at least 75%, at least 77.7%, at least 85%, at least 88.8% or 100% identical to SEQ ID NO: 54. In some embodiments, a 581-589 region of an AAV5 VP capsid polypeptide has a sequence that is at least 75%, at least 77.7%, at least 85%, at least 88.8% or 100% identical to SEQ ID NO: 429. In some embodiments, a 581-589 region of an AAV5 VP capsid polypeptide has a sequence that is at least 75%, at least 77.7%, at least 85%, at least 88.8% or 100% identical to SEQ ID NO: 708. In some embodiments, a 581-589 region of an AAV5 VP capsid polypeptide has a sequence that is at least 75%, at least 77.7%, at least 85%, at least 88.8% or 100% identical to SEQ ID NO: 428. In some embodiments, a 581-589 region of an AAV5 VP capsid polypeptide has a sequence that is at least 75%, at least 77.7%, at least 85%, at least 88.8% or 100% identical to SEQ ID NO: 4119. In some embodiments, a 581-589 region of an AAV5 VP capsid polypeptide has a sequence that is at least 75%, at least 77.7%, at least 85%, at least 88.8% or 100% identical to SEQ ID NO: 3906. In some embodiments, a 581-589 region of an AAV5 VP capsid polypeptide has a sequence that is at least 75%, at least 77.7%, at least 85%, at least 88.8% or 100% identical to SEQ ID NO: 2456. In some embodiments, a 581-589 region of an AAV5 VP capsid polypeptide has a sequence that is at least 75%, at least 77.7%, at least 85%, at least 88.8% or 100% identical to SEQ ID NO: 2278. In some embodiments, a 581-589 region of an AAV5 VP capsid polypeptide has a sequence that is at least 75%, at least 77.7%, at least 85%, at least 88.8% or 100% identical to SEQ ID NO: 5006. In some embodiments, a 581-589 region of an AAV5 VP capsid polypeptide has a sequence that is at least 75%, at least 77.7%, at least 85%, at least 88.8% or 100% identical to SEQ ID NO: 426.

[0200] In some embodiments, a 581-589 region of an AAV5 VP capsid polypeptide has a sequence of SEQ ID NO: 18. In some embodiments, a 581-589 region of an AAV5 VP capsid polypeptide has a sequence of SEQ ID NO: 3472. In some embodiments, a 581-589 region of an AAV5 VP capsid polypeptide has a sequence of SEQ ID NO: 262. In some embodiments, a 581-589 region of an AAV5 VP capsid polypeptide has a sequence of SEQ ID NO: 3306. In some embodiments, a 581-589 region of an AAV5 VP capsid polypeptide has a sequence of SEQ ID NO: 2028. In some embodiments, a 581-589 region of an AAV5 VP capsid polypeptide has a sequence of SEQ ID NO: 2791. In some embodiments, a 581-589 region of an AAV5 VP capsid polypeptide has a sequence of SEQ ID NO: 424. In some embodiments, a 581-589 region of an AAV5 VP capsid polypeptide has a sequence of SEQ ID NO: 2536. In some embodiments, a 581-589 region of an AAV5 VP capsid polypeptide has a sequence of SEQ ID NO: 1971. In some embodiments, a 581-589 region of an AAV5 VP capsid polypeptide has a sequence of SEQ ID NO: 415. In some embodiments, a 581-589 region of an AAV5 VP capsid polypeptide has a sequence of SEQ ID NO: 3846. In some embodiments, a 581-589 region of an AAV5 VP capsid polypeptide has a sequence of SEQ ID NO: 3283. In some embodiments, a 581-589 region of an AAV5 VP capsid polypeptide has a sequence of SEQ ID NO: 1956. In some embodiments, a 581-589 region of an AAV5 VP capsid polypeptide has a sequence of SEQ ID NO: 3297. In some embodiments, a 581-589 region of an AAV5 VP capsid polypeptide has a sequence of SEQ ID NO: 4545. In some embodiments, a 581-589 region of an AAV5 VP capsid polypeptide has a sequence of SEQ ID NO: 2661. In some embodiments, a 581-589 region of an AAV5 VP capsid polypeptide has a sequence of SEQ ID NO: 1576. In some embodiments, a 581-589 region of an AAV5 VP capsid polypeptide has a sequence of SEQ ID NO: 425. In some embodiments, a 581-589 region of an AAV5 VP capsid polypeptide has a sequence of SEQ ID NO: 709. In some embodiments, a 581-589 region of an AAV5 VP capsid polypeptide has a sequence of SEQ ID NO: 2168. In some embodiments, a 581-589 region of an AAV5 VP capsid polypeptide has a sequence of SEQ ID NO: 54. In some embodiments, a 581-589 region of an AAV5 VP capsid polypeptide has a sequence of SEQ ID NO: 429. In some embodiments, a 581-589 region of an AAV5 VP capsid polypeptide has a sequence of SEQ ID NO: 708. In some embodiments, a 581-589 region of an AAV5 VP capsid polypeptide has a sequence of SEQ ID NO: 428. In some embodiments, a 581-589 region of an AAV5 VP capsid polypeptide has a sequence of SEQ ID NO: 4119. In some embodiments, a 581-589 region of an AAV5 VP capsid polypeptide has a sequence of SEQ ID NO: 3906. In some embodiments, a 581-589 region of an AAV5 VP capsid polypeptide has a sequence of SEQ ID NO: 2456. In some embodiments, a 581-589 region of an AAV5 VP capsid polypeptide has a sequence of SEQ ID NO: 2278. In some embodiments, a 581-589 region of an AAV5 VP capsid polypeptide has a sequence of SEQ ID NO: 5006. In some embodiments, a 581-589 region of an AAV5 VP capsid polypeptide has a sequence of SEQ ID NO: 426.

[0201] In some embodiments, a 581-589 region of an AAV5 VP capsid polypeptide has a sequence of SEQ ID NO: 18. In some embodiments, a 581-589 region of an AAV5 VP capsid polypeptide has a sequence of SEQ ID NO: 2028. In some embodiments, a 581-589 region of an AAV5 VP capsid polypeptide has a sequence of SEQ ID NO: 424. In some embodiments, a 581-589 region of an AAV5 VP capsid polypeptide has a sequence of SEQ ID NO: 3306. In some embodiments, a 581-589 region of an AAV5 VP capsid polypeptide has a sequence of SEQ ID NO: 3472. In some embodiments, a 581-589 region of an AAV5 VP capsid polypeptide has a sequence of SEQ ID NO: 415. In some embodiments, a 581-589 region of an AAV5 VP capsid polypeptide has a sequence of SEQ ID NO: 709. In some embodiments, a 581-589 region of an AAV5 VP capsid polypeptide has a sequence of SEQ ID NO: 1971. In some embodiments, a 581-589 region of an AAV5 VP capsid polypeptide has a sequence of SEQ ID NO: 2791. In some embodiments, a 581-589 region of an AAV5 VP capsid polypeptide has a sequence of SEQ ID NO: 1956. In some embodiments, a 581-589 region of an AAV5 VP capsid polypeptide has a sequence of SEQ ID NO: 262. In some embodiments, a 581-589 region of an AAV5 VP capsid polypeptide has a sequence of SEQ ID NO: 425. In some embodiments, a 581-589 region of an AAV5 VP capsid polypeptide has a sequence of SEQ ID NO: 2536. In some embodiments, a 581-589 region of an AAV5 VP capsid polypeptide has a sequence of SEQ ID NO: 708. In some embodiments, a 581-589 region of an AAV5 VP capsid polypeptide has a sequence of SEQ ID NO: 54. In some embodiments, a 581-589 region of an AAV5 VP capsid polypeptide has a sequence of SEQ ID NO: 3283. In some embodiments, a 581-589 region of an AAV5 VP capsid polypeptide has a sequence of SEQ ID NO: 430. In some embodiments, a 581-589 region of an AAV5 VP capsid polypeptide has a sequence of SEQ ID NO: 3297. In some embodiments, a 581-589 region of an AAV5 VP capsid polypeptide has a sequence of SEQ ID NO: 2661. In some embodiments, a 581-589 region of an AAV5 VP capsid polypeptide has a sequence of SEQ ID NO: 428. In some embodiments, a 581-589 region of an AAV5 VP capsid polypeptide has a sequence of SEQ ID NO: 885. In some embodiments, a 581-589 region of an AAV5 VP capsid polypeptide has a sequence of SEQ ID NO: 429. In some embodiments, a 581-589 region of an AAV5 VP capsid polypeptide has a sequence of SEQ ID NO: 569. In some embodiments, a 581-589 region of an AAV5 VP capsid polypeptide has a sequence of SEQ ID NO: 724. In some embodiments, a 581-589 region of an AAV5 VP capsid polypeptide has a sequence of SEQ ID NO: 1576. In some embodiments, a 581-589 region of an AAV5 VP capsid polypeptide has a sequence of SEQ ID NO: 4545. In some embodiments, a 581-589 region of an AAV5 VP capsid polypeptide has a sequence of SEQ ID NO: 426. In some embodiments, a 581-589 region of an AAV5 VP capsid polypeptide has a sequence of SEQ ID NO: 1887. In some embodiments, a 581-589 region of an AAV5 VP capsid polypeptide has a sequence of SEQ ID NO: 3906. In some embodiments, a 581-589 region of an AAV5 VP capsid polypeptide has a sequence of SEQ ID NO: 3935.

[0202] In some embodiments, a 581-589 region of an AAV5 VP capsid polypeptide has a sequence of SEQ ID NO: 18 with 1 or 2 conservative substitutions. In some embodiments, a 581-589 region of an AAV5 VP capsid polypeptide has a sequence of SEQ ID NO: 3472 with 1 or 2 conservative substitutions. In some embodiments, a 581-589 region of an AAV5 VP capsid polypeptide has a sequence of SEQ ID NO: 262 with 1 or 2 conservative substitutions. In some embodiments, a 581-589 region of an AAV5 VP capsid polypeptide has a sequence of SEQ ID NO: 3306 with 1 or 2 conservative substitutions. In some embodiments, a 581-589 region of an AAV5 VP capsid polypeptide has a sequence of SEQ ID NO: 2028 with 1 or 2 conservative substitutions. In some embodiments, a 581-589 region of an AAV5 VP capsid polypeptide has a sequence of SEQ ID NO: 2791 with 1 or 2 conservative substitutions. In some embodiments, a 581-589 region of an AAV5 VP capsid polypeptide has a sequence of SEQ ID NO: 424 with 1 or 2 conservative substitutions. In some embodiments, a 581-589 region of an AAV5 VP capsid polypeptide has a sequence of SEQ ID NO: 2536 with 1 or 2 conservative substitutions. In some embodiments, a 581-589 region of an AAV5 VP capsid polypeptide has a sequence of SEQ ID NO: 1971 with 1 or 2 conservative substitutions. In some embodiments, a 581-589 region of an AAV5 VP capsid polypeptide has a sequence of SEQ ID NO: 415 with 1 or 2 conservative substitutions. In some embodiments, a 581-589 region of an AAV5 VP capsid polypeptide has a sequence of SEQ ID NO: 3846 with 1 or 2 conservative substitutions. In some embodiments, a 581-589 region of an AAV5 VP capsid polypeptide has a sequence of SEQ ID NO: 3283 with 1 or 2 conservative substitutions. In some embodiments, a 581-589 region of an AAV5 VP capsid polypeptide has a sequence of SEQ ID NO: 1956 with 1 or 2 conservative substitutions. In some embodiments, a 581-589 region of an AAV5 VP capsid polypeptide has a sequence of SEQ ID NO: 3297 with 1 or 2 conservative substitutions. In some embodiments, a 581-589 region of an AAV5 VP capsid polypeptide has a sequence of SEQ ID NO: 4545 with 1 or 2 conservative substitutions. In some embodiments, a 581-589 region of an AAV5 VP capsid polypeptide has a sequence of SEQ ID NO: 2661 with 1 or 2 conservative substitutions. In some embodiments, a 581-589 region of an AAV5 VP capsid polypeptide has a sequence of SEQ ID NO: 1576 with 1 or 2 conservative substitutions. In some embodiments, a 581-589 region of an AAV5 VP capsid polypeptide has a sequence of SEQ ID NO: 425 with 1 or 2 conservative substitutions. In some embodiments, a 581-589 region of an AAV5 VP capsid polypeptide has a sequence of SEQ ID NO: 709 with 1 or 2 conservative substitutions. In some embodiments, a 581-589 region of an AAV5 VP capsid polypeptide has a sequence of SEQ ID NO: 2168 with 1 or 2 conservative substitutions. In some embodiments, a 581-589 region of an AAV5 VP capsid polypeptide has a sequence of SEQ ID NO: 54 with 1 or 2 conservative substitutions. In some embodiments, a 581-589 region of an AAV5 VP capsid polypeptide has a sequence of SEQ ID NO: 429 with 1 or 2 conservative substitutions. In some embodiments, a 581-589 region of an AAV5 VP capsid polypeptide has a sequence of SEQ ID NO: 708 with 1 or 2 conservative substitutions. In some embodiments, a 581-589 region of an AAV5 VP capsid polypeptide has a sequence of SEQ ID NO: 428 with 1 or 2 conservative substitutions. In some embodiments, a 581-589 region of an AAV5 VP capsid polypeptide has a sequence of SEQ ID NO: 4119 with 1 or 2 conservative substitutions. In some embodiments, a 581-589 region of an AAV5 VP capsid polypeptide has a sequence of SEQ ID NO: 3906 with 1 or 2 conservative substitutions. In some embodiments, a 581-589 region of an AAV5 VP capsid polypeptide has a sequence of SEQ ID NO: 2456 with 1 or 2 conservative substitutions. In some embodiments, a 581-589 region of an AAV5 VP capsid polypeptide has a sequence of SEQ ID NO: 2278 with 1 or 2 conservative substitutions. In some embodiments, a 581-589 region of an AAV5 VP capsid polypeptide has a sequence of SEQ ID NO: 5006 with 1 or 2 conservative substitutions. In some embodiments, a 581-589 region of an AAV5 VP capsid polypeptide has a sequence of SEQ ID NO: 426 with 1 or 2 conservative substitutions. The conservative substitutions may be at any position in the 581-589 region.

[0203] In some embodiments, an AAV VP capsid polypeptide preferentially targets a CNS tissue at a DNA enrichment of at least 100-fold greater than a wild type AAV9. For example, an AAV VP capsid polypeptide comprising a 581-589 region of SEQ ID NO: 18, SEQ ID NO: 3472, SEQ ID NO: 262, SEQ ID NO: 3306, SEQ ID NO: 2028, SEQ ID NO: 2791, SEQ ID NO: 424, SEQ ID NO: 2536, SEQ ID NO: 1971, SEQ ID NO: 415, SEQ ID NO: 3846, SEQ ID NO: 3283, SEQ ID NO: 1956, SEQ ID NO: 3297, SEQ ID NO: 4545, SEQ ID NO: 2661, SEQ ID NO: 1576, SEQ ID NO: 425, SEQ ID NO: 709, SEQ ID NO: 2168, SEQ ID NO: 54, SEQ ID NO: 429, SEQ ID NO: 708, SEQ ID NO: 428, SEQ ID NO: 4119, SEQ ID NO: 3906, SEQ ID NO: 2456, SEQ ID NO: 2278, SEQ ID NO: 5006, SEQ ID NO: 426, SEQ ID NO: 307, SEQ ID NO: 5155, SEQ ID NO: 2640, SEQ ID NO: 4317, SEQ ID NO: 1145, SEQ ID NO: 430, or SEQ ID NO: 885 may preferentially target a CNS tissue at a DNA enrichment of at least 100-fold greater than a wild type AAV9.

[0204] In some embodiments, an AAV VP capsid polypeptide preferentially targets a CNS tissue at a DNA enrichment of at least 200-fold greater than a wild type AAV9. For example, an AAV VP capsid polypeptide comprising a 581-589 region of SEQ ID NO: 18, SEQ ID NO: 3472, SEQ ID NO: 262, SEQ ID NO: 3306, SEQ ID NO: 2028, SEQ ID NO: 2791, SEQ ID NO: 424, SEQ ID NO: 2536, SEQ ID NO: 1971, SEQ ID NO: 415, SEQ ID NO: 3846, SEQ ID NO: 3283, SEQ ID NO: 1956, or SEQ ID NO: 3297 may preferentially target a CNS tissue at a DNA enrichment of at least 200-fold greater than a wild type AAV9.

[0205] In some embodiments, an AAV VP capsid polypeptide preferentially targets a CNS tissue at a DNA enrichment of at least 1000-fold greater than a wild type AAV9. For example, an AAV VP capsid polypeptide comprising a 581-589 region of SEQ ID NO: 18 may preferentially target a CNS tissue at a DNA enrichment of at least 1000-fold greater than a wild type AAV9.

[0206] In some embodiments, an AAV VP capsid polypeptide preferentially targets a CNS tissue at an RNA enrichment of at least 100-fold greater than a wild type AAV9. For example, an AAV VP capsid polypeptide comprising a 581-589 region of SEQ ID NO: 18, SEQ ID NO: 3472, SEQ ID NO: 262, SEQ ID NO: 3306, SEQ ID NO: 2028, SEQ ID NO: 2791, SEQ ID NO: 424, SEQ ID NO: 2536, SEQ ID NO: 1971, SEQ ID NO: 415, SEQ ID NO: 3283, SEQ ID NO: 1956, SEQ ID NO: 3297, SEQ ID NO: 4545, SEQ ID NO: 2661, SEQ ID NO: 1576, SEQ ID NO: 425, SEQ ID NO: 709, SEQ ID NO: 54, SEQ ID NO: 429, SEQ ID NO: 428, SEQ ID NO: 426, or SEQ ID NO: 430 may preferentially target a CNS tissue at an RNA enrichment of at least 100-fold greater than a wild type AAV9.

[0207] In some embodiments, an AAV VP capsid polypeptide preferentially targets a CNS tissue at an RNA enrichment of at least 200-fold greater than a wild type AAV9. For example, an AAV VP capsid polypeptide comprising a 581-589 region of SEQ ID NO: 18, SEQ ID NO: 3472, SEQ ID NO: 262, SEQ ID NO: 3306, SEQ ID NO: 2028, SEQ ID NO: 2791, SEQ ID NO: 424, SEQ ID NO: 2536, SEQ ID NO: 1971, SEQ ID NO: 415, SEQ ID NO: 3283, SEQ ID NO: 1956, SEQ ID NO: 2661, SEQ ID NO: 1576, SEQ ID NO: 425, SEQ ID NO: 709, SEQ ID NO: 54, SEQ ID NO: 430, SEQ ID NO: 569, and SEQ ID NO: 719 may preferentially target a CNS tissue at an RNA enrichment of at least 200-fold greater than a wild type AAV9.

[0208] In some embodiments, an AAV VP capsid polypeptide preferentially targets a CNS tissue at an RNA enrichment of at least 500-fold greater than a wild type AAV9. For example, an AAV VP capsid polypeptide comprising a 581-589 region of SEQ ID NO: 18, SEQ ID NO: 3472, SEQ ID NO: 262, and SEQ ID NO: 2028 may preferentially target a CNS tissue at an RNA enrichment of at least 500-fold greater than a wild type AAV9.

[0209] In some embodiments, an AAV VP capsid polypeptide preferentially targets a CNS tissue at a DNA enrichment of at least 5-fold greater than a wild type AAV9. For example, an AAV VP capsid polypeptide comprising a 581-589 region of SEQ ID NO: 18, SEQ ID NO: 3472, SEQ ID NO: 262, SEQ ID NO: 3306, SEQ ID NO: 2028, SEQ ID NO: 2791, SEQ ID NO: 424, SEQ ID NO: 2536, SEQ ID NO: 1971, SEQ ID NO: 415, SEQ ID NO: 3846, SEQ ID NO: 3283, SEQ ID NO: 1956, SEQ ID NO: 3297, SEQ ID NO: 4545, SEQ ID NO: 2661, or SEQ ID NO: 1576 may preferentially target a CNS tissue at a DNA enrichment of at least 5-fold greater than a wild type AAV5.

[0210] In some embodiments, an AAV VP capsid polypeptide preferentially targets a CNS tissue at a DNA enrichment of at least 10-fold greater than a wild type AAV9. For example, an AAV VP capsid polypeptide comprising a 581-589 region of SEQ ID NO: 18, SEQ ID NO: 3472, SEQ ID NO: 262, SEQ ID NO: 3306, SEQ ID NO: 2028, SEQ ID NO: 2791, or SEQ ID NO: 424 may preferentially target a CNS tissue at a DNA enrichment of at least 10-fold greater than a wild type AAV5.

[0211] In some embodiments, an AAV VP capsid polypeptide preferentially targets a CNS tissue at an RNA enrichment of at least 5-fold greater than a wild type AAV9. For example, an AAV VP capsid polypeptide comprising a 581-589 region of SEQ ID NO: 18, SEQ ID NO: 3472, SEQ ID NO: 262, SEQ ID NO: 3306, SEQ ID NO: 2028, SEQ ID NO: 2791, SEQ ID NO: 424, SEQ ID NO: 2536, SEQ ID NO: 1971, SEQ ID NO: 415, SEQ ID NO: 3283, SEQ ID NO: 1956, SEQ ID NO: 3297, SEQ ID NO: 4545, SEQ ID NO: 2661, SEQ ID NO: 1576, SEQ ID NO: 425, SEQ ID NO: 709, SEQ ID NO: 54, SEQ ID NO: 429, SEQ ID NO: 708, SEQ ID NO: 428, SEQ ID NO: 426, SEQ ID NO: 307, SEQ ID NO: 4317, SEQ ID NO: 430, or SEQ ID NO: 885 may preferentially target a CNS tissue at an RNA enrichment of at least 5-fold greater than a wild type AAV5.

[0212] In some embodiments, an AAV VP capsid polypeptide preferentially targets a CNS tissue at an RNA enrichment of at least 20-fold greater than a wild type AAV9. For example, an AAV VP capsid polypeptide comprising a 581-589 region of SEQ ID NO: 18, SEQ ID NO: 3472, SEQ ID NO: 262, SEQ ID NO: 3306, SEQ ID NO: 2028, SEQ ID NO: 2791, SEQ ID NO: 424, SEQ ID NO: 2536, SEQ ID NO: 1971, SEQ ID NO: 415, SEQ ID NO: 3283, SEQ ID NO: 1956, SEQ ID NO: 2661, SEQ ID NO: 1576, SEQ ID NO: 425, SEQ ID NO: 709, SEQ ID NO: 54, SEQ ID NO: 430, SEQ ID NO: 569, and SEQ ID NO: 719 may preferentially target a CNS tissue at an RNA enrichment of at least 20-fold greater than a wild type AAV5.

[0213] In some embodiments, the engineered AAV VP capsid polypeptide comprises a polypeptide sequence represented by the formula: (A)-(X)—(B) wherein: (A) is the polypeptide sequence of SEQ ID NO: 5812 (VAYNVGGQMATNNQSSTTAP, corresponding to residues 561 to 580 of SEQ ID NO: 2); (X) is the 581-589 region having a polypeptide sequence selected from the list of polypeptides in TABLE 2 (SEQ ID NO: 12-SEQ ID NO: 3937) that is expected to confer CNS tissue tropism or preference on a recombinant AAV virion (rAAV), based on a primary screen; and (B) is the polypeptide sequence of SEQ ID NO: 5813 (IVPGSVWMERDVYLQGPIWA, corresponding to residues 590 to 609 of SEQ ID NO: 2); and wherein the capsid polypeptide is capable of assembling into the rAAV and, the capsid does not have the sequence of any of SEQ ID NO: 1, SEQ ID NO: 3, SEQ ID NO: 4, SEQ ID NO: 5, SEQ ID NO: 6, SEQ ID NO: 7, or SEQ ID NO: 8. Also encompassed herein are rAAVs composed of engineered AAV5 VP2 capsid polypeptides and engineered AAV5 VP3 capsid polypeptides comprising a 581-589 region having a sequence selected from the list of polypeptides in TABLE 2 (SEQ ID NO: 12-SEQ ID NO: 3937) at the region corresponding to amino acid residues 445 to 453 in AAV5 VP2 or the region corresponding to amino acid residues 389 to 397 in AAV5 VP3.

TABLE2
Sequences of 581-589 Regions

| SEQ ID | |
|---|---|
| NO | Sequence |
| 12 | AAANMYWWS |
| 13 | AAAQSPEGV |
| 14 | AAAVQWQMM |
| 15 | AACHIMSQT |
| 16 | AAEPQHCYY |
| 17 | AAGQFEWLH |
| 18 | AAGRFNYFG |
| 19 | AAGTHHVMR |
| 20 | AAGVVQRGE |
| 21 | AALNTQLGH |
| 22 | AALSSRQVL |
| 23 | AALSWRSHF |
| 24 | AALYSQRAQ |
| 25 | AAMPINMCC |
| 26 | AAMTQHCPV |
| 27 | AANDCQIWF |
| 28 | AANYYATSW |
| 29 | AAQFDGFHV |
| 30 | AAQLEGFHV |
| 31 | AAQSMVCDS |
| 32 | AARDTMEGK |
| 33 | AARIYLMYV |
| 34 | AASYWGNMY |
| 35 | AATMTNHAW |
| 36 | AATQEYWQG |
| 37 | AAVYGKFSW |
| 38 | AAYLDDQYS |
| 39 | AAYPCQLER |
| 40 | AAYPYICAD |
| 41 | ACGYFTYNV |
| 42 | ACHTMVIEN |
| 43 | ACIYKIAQE |
| 44 | ACKFGQESD |
| 45 | ACYQYKCRR |
| 46 | ADAIRQPVL |
| 47 | ADAMRQPVL |
| 48 | ADAPVNASC |
| 49 | ADSIKLTEY |
| 50 | ADYTMDWHL |
| 51 | AEAMMSAVF |
| 52 | AEAQFQYWS |
| 53 | AEDLSPVPV |
| 54 | AEDYWDLGA |
| 55 | AEIILPGMQ |
| 56 | AEIYVHCQT |
| 57 | AEIYVHWQT |
| 58 | AEKLYGLST |
| 59 | AEREHWFYC |
| 60 | AFAQKCRYH |
| 61 | AFAYELNIN |
| 62 | AFCPISSGI |
| 63 | AFEQWAHNE |
| 64 | AFHAHEQAG |
| 65 | AFHQVHSMG |
| 66 | AFNDKPSCC |
| 67 | AFQNACKSA |
| 68 | AFTYGNHQF |
| 69 | AGASTWMQS |
| 70 | AGCSIQAWC |
| 71 | AGIVQGIWG |
| 72 | AGKCTPVTS |
| 73 | AGKYYQDYQ |
| 74 | AGMPWDGHC |
| 75 | AGQREVPSD |
| 76 | AHAMLDRNF |
| 77 | AHATYNKPT |
| 78 | AHDSASRCA |
| 79 | AHDWTHICA |
| 80 | AHGNSPTAY |
| 81 | AHHLGTMGH |
| 82 | AHKSPDKDV |
| 83 | AHLHNQFMP |
| 84 | AHLTPNLHE |
| 85 | AHMDEFRSG |
| 86 | AHMSTYWGF |
| 87 | AHNPCMHHQ |
| 88 | AHQTSWAWI |
| 89 | AHSDLTGAI |
| 90 | AHYQFQALM |
| 91 | AICQQHSYA |
| 92 | AIDQLSWHG |
| 93 | AIEIFGACV |
| 94 | AIEMTKYPW |
| 95 | AILSIYPSG |
| 96 | AILYQSAGE |
| 97 | AIMHYHRFK |
| 98 | AIQQCHAYA |
| 99 | AIQWFQAPG |
| 100 | AISYMQLEA |
| 101 | AITPRMGMK |
| 102 | AITSCICEK |
| 103 | AIWGYGMNY |
| 104 | AKAYCTSVD |
| 105 | AKCEHDHCW |
| 106 | AKDCVQSQA |
| 107 | AKFVGVAAD |
| 108 | AKIHGAWKA |
| 109 | AKQHALMIE |
| 110 | AKSTMPGYQ |
| 111 | AKTFVMSFG |
| 112 | AKTSLQIDP |
| 113 | ALEASYGYF |
| 114 | ALECGHLPY |
| 115 | ALFYMNADF |
| 116 | ALIQFGQSW |
| 117 | ALKSHGCLT |
| 118 | ALLNRTACW |
| 119 | ALPHIQSEP |
| 120 | ALPHIRSEP |
| 121 | ALTNWGMSG |
| 122 | ALWMFDVFG |
| 123 | AMAQSMVQF |
| 124 | AMDKIPVFQ |
| 125 | AMDPPIREP |
| 126 | AMDRIPIFQ |
| 127 | AMEQVSATF |
| 128 | AMFNGTSMS |
| 129 | AMGIGMRID |
| 130 | AMGPCNGPM |
| 131 | AMGYNGTYP |
| 132 | AMKWVEACP |
| 133 | AMKWVEAWQ |
| 134 | AMKYIGCPM |
| 135 | AMLAYFATE |
| 136 | AMLKNHCYH |
| 137 | AMMLCIWVD |
| 138 | AMMNMNVQF |
| 139 | AMQCFPAQQ |
| 140 | AMQCNQMQD |
| 141 | AMQPTRIVG |
| 142 | AMQPVRIVV |
| 143 | AMRQIIAPC |
| 144 | ANAVTEEWM |
| 145 | ANGDKVAMD |
| 146 | ANITIGPQA |
| 147 | ANIYICPQA |
| 148 | ANLDSHQFE |
| 149 | ANMVAHMMA |
| 150 | ANQHFHAES |
| 151 | ANTRDNAEL |
| 152 | ANTWLAHFE |
| 153 | APCHDKDRE |
| 154 | APIQGQMMM |
| 155 | APKLVGLST |
| 156 | AQCQDMWGH |
| 157 | AQEPFKTIQ |
| 158 | AQFRAIIGN |
| 159 | AQGTMDSWY |
| 160 | AQIQPAMFP |
| 161 | AQMTVCARE |
| 162 | AQMYWSSKD |
| 163 | AQNNKFDGS |
| 164 | AQSFLWKGC |
| 165 | AQVLMEMCT |
| 166 | AQYCTIMAH |
| 167 | ARKFCEGTP |
| 168 | ARQVYEMNG |
| 169 | ARQWYEMTG |
| 170 | ASEMTKGPW |
| 171 | ASFMSWEGA |
| 172 | ASGWAPCSW |
| 173 | ASMQEHHYT |
| 174 | ASQHFHAPQ |
| 175 | ASQHNHEKQ |
| 176 | ASQLIECNA |
| 177 | ASQPRGAEQ |
| 178 | ASQTTHGPL |
| 179 | ASTERAKFG |
| 180 | ASTQQGFWC |
| 181 | ASVCEHTLE |
| 182 | ASVECWQWT |
| 183 | ASVPISHSQ |
| 184 | ASWLCGRNV |
| 185 | ASYNGCMIC |
| 186 | ASYPSSQVF |
| 187 | ASYSICDAG |
| 188 | ATAGIPTAG |
| 189 | ATAQFQMEG |
| 190 | ATCTFNPGI |
| 191 | ATCWVQMGQ |
| 192 | ATEGYNMHC |
| 193 | ATENYNRRG |
| 194 | ATFMPNQSF |
| 195 | ATGMRIAVC |
| 196 | ATGMRIDVC |
| 197 | ATGTYNIQE |
| 198 | ATISKLECQ |
| 199 | ATKTCAEGG |
| 200 | ATLNSMHTQ |
| 201 | ATMCHCVVA |
| 202 | ATMWFTANG |
| 203 | ATMWMQWWD |
| 204 | ATMWVQAYG |
| 205 | ATNQLNESF |
| 206 | ATQGYNMHC |
| 207 | ATQLYMHHK |
| 208 | ATQMYMHCK |
| 209 | ATTFSSASF |
| 210 | ATTTVNRQE |
| 211 | ATVDVKGAH |
| 212 | ATVWSINAD |
| 213 | ATWSADVTA |
| 214 | AVDLTSKHS |
| 215 | AVDPTKDGQ |
| 216 | AVEQLNQPI |
| 217 | AVGCSQHWK |
| 218 | AVKCPESLI |
| 219 | AVMPSHQIT |
| 220 | AVNACSNSH |
| 221 | AVNDCKMWE |
| 222 | AVRIMFMQE |
| 223 | AVSGCRGSA |
| 224 | AVSNAMIAG |
| 225 | AVSNWLETS |
| 226 | AVSPSNFLA |
| 227 | AWCCSSVGE |
| 228 | AWFKTMPSD |
| 229 | AWFSHHQFC |
| 230 | AWHQTQDDM |
| 231 | AWREQEWAH |
| 232 | AWSEFQWFD |
| 233 | AWTPLMSYN |
| 234 | AWVPEGHFP |
| 235 | AWYHTQDDM |
| 236 | AYADMFQCK |
| 237 | AYCLTNGPH |
| 238 | AYCSKMRGE |
| 239 | AYDFVGVQE |
| 240 | AYFLLHASG |
| 241 | AYGPFAMLY |
| 242 | AYNAMHTAW |
| 243 | AYNFKVGSD |
| 244 | AYNIDYQPV |
| 245 | AYNWQQTSA |
| 246 | AYRCYACET |
| 247 | AYRCYAVEQ |
| 248 | CAARCYKAR |
| 249 | CADFKNECA |
| 250 | CADTAWQYT |
| 251 | CAEPKRMEY |
| 252 | CAEWRIMWS |
| 253 | CAGFMQTCQ |
| 254 | CAGGIVCHN |
| 255 | CAGGTVHHN |
| 256 | CAHSPHSHL |
| 257 | CAHYAQWGK |
| 258 | CAILAYAHH |
| 259 | CAIYSGLHI |
| 260 | CAMQCEHAE |
| 261 | CANYWQDMG |
| 262 | CATRFNIGG |
| 263 | CCCTVEREC |
| 264 | CCEEYACAE |
| 265 | CCTPTECQM |
| 266 | CCYPTHCQM |
| 267 | CCYQLGLMP |
| 268 | CDGSKSVGD |
| 269 | CDLCIAACE |
| 270 | CECRYFKFA |
| 271 | CECSYFKHA |
| 272 | CEKVQAHWM |
| 273 | CETYTIHIP |
| 274 | CEVDICNDR |
| 275 | CFLLTNRIS |
| 276 | CFTITQGEW |
| 277 | CFWVRGMWN |
| 278 | CGANYQRFG |
| 279 | CGGTYFALP |
| 280 | CGVNYQWFG |
| 281 | CHAGFPAWP |
| 282 | CHCKTDMWA |
| 283 | CHHHYHTHL |
| 284 | CHNVENCME |
| 285 | CHVNLKAWW |
| 286 | CIENMFVNS |
| 287 | CIGNKSASG |
| 288 | CIHECCDSG |
| 289 | CIHSVHFAA |
| 290 | CIKWYAAST |
| 291 | CILPRGIGQ |
| 292 | CILYLEEAQ |
| 293 | CIMFRSATS |
| 294 | CIMTRAATS |
| 295 | CIRSKPDYN |
| 296 | CISWGGNYG |
| 297 | CIVQKGNMV |
| 298 | CIYSKTGAG |
| 299 | CKAHKQTMS |
| 300 | CKELYPQAV |
| 301 | CKKTTGVCY |
| 302 | CKNPTGVCY |
| 303 | CKQEQLKMP |
| 304 | CLDHINSLS |
| 305 | CLWIYSVMG |
| 306 | CMCRVEQVA |
| 307 | CMKVKQSQP |
| 308 | CMMLMMTGQ |
| 309 | CMWVMIHFE |
| 310 | CMYNVSHWN |
| 311 | CMYTGDGPM |
| 312 | CNFSALPKH |
| 313 | CNGHYTVIS |
| 314 | CNGPNVSEI |
| 315 | CNQTIRPII |
| 316 | CNQTIRPIK |
| 317 | CNSWYAAST |
| 318 | CNVPRLVRH |
| 319 | CPAKHAQAR |
| 320 | CPESSSHQT |
| 321 | CPKQANRSG |
| 322 | CPTFWGHSE |
| 323 | CPWFIKWGI |
| 324 | CQAIVNRLN |
| 325 | CQASHEHAH |
| 326 | CQDAVGRSY |
| 327 | CQDAVGRTF |
| 328 | CQDCYHCDR |
| 329 | CQEDMSSTY |
| 330 | CQKWYESFG |
| 331 | CQSCISDAG |
| 332 | CQYLSFRTV |
| 333 | CRGKSHDHT |
| 334 | CSAAFQLQP |
| 335 | CSALWGGCC |
| 336 | CSAQIKAAC |
| 337 | CSDVSTIYI |
| 338 | CSFQEKAAC |
| 339 | CSHETGAMC |
| 340 | CSMDEYAMA |
| 341 | CSMHMHYVE |
| 342 | CSMTGVMFE |
| 343 | CSRHDLNGD |
| 344 | CSSGFHLFH |
| 345 | CSTGFHCEQ |
| 346 | CSTNCTANP |
| 347 | CSVPGEQAF |
| 348 | CTASWMSWD |
| 349 | CTCQGTGFS |
| 350 | CTCQGTGFT |
| 351 | CTERTKCAS |
| 352 | CTERTMNAS |
| 353 | CTGIQWTGG |
| 354 | CTHECNDSG |
| 355 | CTHPGHQNQ |
| 356 | CTHWFTSLT |
| 357 | CTIAYASMA |
| 358 | CTILATVHH |
| 359 | CTNAYFMSE |
| 360 | CTNTYFMSE |
| 361 | CTQLKECWL |
| 362 | CTTETQCRS |
| 363 | CTTPHDCHF |
| 364 | CTTPNLQVC |
| 365 | CTTSHLIGC |
| 366 | CTVKEMANH |
| 367 | CTWWGHQSM |
| 368 | CVDAKDHCE |
| 369 | CVEWRIMWS |
| 370 | CVHSKMAFH |
| 371 | CVIDVKEAG |
| 372 | CVMEYMDWG |
| 373 | CVNPDDMAQ |
| 374 | CVQQEMGGG |
| 375 | CVSFDACFA |
| 376 | CVSRAWDEK |
| 377 | CVTPKMDLP |
| 378 | CVTTKGDLP |
| 379 | CVVPLTNYY |
| 380 | CWDLVRDCK |
| 381 | CWQFMTAHP |
| 382 | CWQSEGAMM |
| 383 | CWWNFGKDC |
| 384 | CYMPFKMQH |
| 385 | CYNSGDCDN |
| 386 | CYQFWSQYS |
| 387 | CYTEPSNKH |
| 388 | CYWPMTNCT |
| 389 | DACTNKSHM |
| 390 | DADDSNIAW |
| 391 | DADEYKLDC |
| 392 | DAEVTMDAM |
| 393 | DAFHMKQHC |
| 394 | DAFQYPTIG |
| 395 | DAGFTWINC |
| 396 | DAGKFGVDI |
| 397 | DAGWIMNNS |
| 398 | DAGYSMTYH |
| 399 | DAHHGSRCG |
| 400 | DAHMYMVHQ |
| 401 | DAHVAFTDC |
| 402 | DAIHFNMKD |
| 403 | DAITVCAQE |
| 404 | DAIWYGRLG |
| 405 | DALHIGRSG |
| 406 | DAMGYLKGG |
| 407 | DAMQKHSAE |
| 408 | DANLYHPME |
| 409 | DANMQPVTF |
| 410 | DAPLIPQWG |
| 411 | DAQCRNTDG |
| 412 | DAQGIELFT |
| 413 | DAQLLMQAD |
| 414 | DAQLSTSYW |
| 415 | DARVYRALD |
| 416 | DASCATLWS |
| 417 | DASCATPWS |
| 418 | DASHVKSIE |
| 419 | DASIGAGPF |
| 420 | DASIMMEMG |
| 421 | DASIVWTID |
| 422 | DASTQCYMS |
| 423 | DATWEHIRL |
| 424 | DAWCFISSY |
| 425 | DAWLQLKDN |
| 426 | DAWMMMWGS |
| 427 | DAWQMKEAL |
| 428 | DAWQMLSGN |
| 429 | DAWSVLQDK |
| 430 | DAWSYQCYH |
| 431 | DAWYSKSQQ |
| 432 | DAYACSSSF |
| 433 | DAYPSNIAW |
| 434 | DCDAWHANV |
| 435 | DCDIGWGCF |
| 436 | DCHQSPVFY |
| 437 | DCMRNTVFE |
| 438 | DCMWMQNGL |
| 439 | DCNFDCPGA |
| 440 | DCQGQHRVC |
| 441 | DCQQILWDA |
| 442 | DCRTLEEFI |
| 443 | DCSWQTMAF |
| 444 | DCVVPMPWP |
| 445 | DEMKFNRDD |
| 446 | DFAACNSGF |
| 447 | DFACHNNFT |
| 448 | DFAHHSTGV |
| 449 | DFASCDICS |
| 450 | DFASFNDCS |
| 451 | DFAYHSTGV |
| 452 | DFDPWFITT |
| 453 | DFELQDTSF |
| 454 | DFEYSGQLG |
| 455 | DFEYSHDWN |
| 456 | DFGGVMGTA |
| 457 | DFHTMHQFE |
| 458 | DFIHNCHCD |
| 459 | DFINMPYWS |
| 460 | DFMQNSVHY |
| 461 | DFRHVRRSL |
| 462 | DFSQHKMHQ |
| 463 | DFSVTSHMG |
| 464 | DFVTNPNYE |
| 465 | DFYTFSFEN |
| 466 | DGAVYVKQD |
| 467 | DGDAKLVDG |
| 468 | DGGWFMQGE |
| 469 | DGIVQGVWG |
| 470 | DGKLQSTCI |
| 471 | DGKLQSTCM |
| 472 | DGQPYMTYS |
| 473 | DGSFVQMTQ |
| 474 | DGYMCMSGG |
| 475 | DHCSMCCGN |
| 476 | DHKHNVIYP |
| 477 | DHMQWGKFD |
| 478 | DHRHSFMGF |
| 479 | DHVMLRMIN |
| 480 | DHWYFLYHG |
| 481 | DICEGPKQY |
| 482 | DICQVIDNE |
| 483 | DICSDSWKV |
| 484 | DIDSFMHCL |
| 485 | DIGFMDTRA |
| 486 | DIICFNWQV |
| 487 | DIKCERDAD |
| 488 | DIMRLSWPI |
| 489 | DIQLYWMNQ |
| 490 | DIREMMCKN |
| 491 | DIRRAFAHC |
| 492 | DISFGEYNP |
| 493 | DISSMYWWH |
| 494 | DISWGGLME |
| 495 | DISYFLYHG |
| 496 | DIWIQMVNT |
| 497 | DKCCDTGLS |
| 498 | DKCYMTSSF |
| 499 | DKFPTHFSD |
| 500 | DKHEMVNVG |
| 501 | DKIFTIACP |
| 502 | DKIFYGACP |
| 503 | DKLPKVCDW |
| 504 | DKLTQSAYQ |
| 505 | DKLVYTQDR |
| 506 | DKNATAIWE |
| 507 | DKQFANHFT |
| 508 | DKQWAHHSM |
| 509 | DKRICHLNY |
| 510 | DKTVQSLAL |
| 511 | DKVAVDPYR |
| 512 | DKYMFQRDG |
| 513 | DKYMFWRDE |
| 514 | DLEPITTQA |
| 515 | DLFAIKQMW |
| 516 | DLGPISSWM |
| 517 | DLHRFDADY |
| 518 | DLIVKKSTG |
| 519 | DLIWNHLRT |
| 520 | DLLGIINGG |
| 521 | DLQYRLCQQ |
| 522 | DLYGQPNYC |
| 523 | DLYIMSDAN |
| 524 | DMCEQNNMQ |
| 525 | DMCVQNNGQ |
| 526 | DMEGCCGCA |
| 527 | DMHMKDMDS |
| 528 | DMHRFDADY |
| 529 | DMLPNNEWP |
| 530 | DMTEWNFLF |
| 531 | DMVFNNEWP |
| 532 | DMVMPEMYG |
| 533 | DNADLHHEC |
| 534 | DNCSDGWKV |
| 535 | DNKCYHMLM |
| 536 | DNKCYSMAM |
| 537 | DNMYPECMQ |
| 538 | DNRMWYMCG |
| 539 | DNRMWYMYG |
| 540 | DNVHPDSQA |
| 541 | DNVHRDCQA |
| 542 | DNVQISDAE |
| 543 | DPEFMAHCE |
| 544 | DPEFMTHCE |
| 545 | DPHQLPKKS |
| 546 | DQGSFNMCR |
| 547 | DQLICNMNE |
| 548 | DQLNPGVQA |
| 549 | DQLPVQYSL |
| 550 | DQMFHQFVT |
| 551 | DQMPYETNA |
| 552 | DQNINIHTS |
| 553 | DQQKLECYH |
| 554 | DQQSIGDHE |
| 555 | DQSLVDSQY |
| 556 | DQTMESGKT |
| 557 | DQTMFCAWC |
| 558 | DRAQESMGP |
| 559 | DRCWMPYRN |
| 560 | DREIYAHWD |
| 561 | DRENAMFFG |
| 562 | DRMQKNSAE |
| 563 | DRMWIDIAS |
| 564 | DRNVCNVCH |
| 565 | DRSGNWLWA |
| 566 | DRSQSWLWA |
| 567 | DRYYMDALM |
| 568 | DSAFYDRDN |
| 569 | DSASPIMGM |
| 570 | DSDCYTLDC |
| 571 | DSDIQFGIG |
| 572 | DSDYFRQMD |
| 573 | DSEETDYYQ |
| 574 | DSFFYNFGA |
| 575 | DSFILEAMC |
| 576 | DSGQNQQAG |
| 577 | DSHINWFCD |
| 578 | DSHLSFECR |
| 579 | DSHTWVADR |
| 580 | DSKHQMCID |
| 581 | DSKPMYHSD |
| 582 | DSKPSVCQE |
| 583 | DSKPWYHVD |
| 584 | DSMCEHHYY |
| 585 | DSNLDMHGC |
| 586 | DSPEQMIRH |
| 587 | DSQCVNHEE |
| 588 | DSQFIGQGE |
| 589 | DSQHVCGVN |
| 590 | DSQPASEVG |
| 591 | DSRFKSEWN |
| 592 | DSRPESTVG |
| 593 | DSRPFYGSV |
| 594 | DSRPKSTNG |
| 595 | DSSPFFWHS |
| 596 | DSSYFHCCD |
| 597 | DSVNSMQCT |
| 598 | DSYCCVSTH |
| 599 | DSYTTWLDD |
| 600 | DTCCFVANP |
| 601 | DTCNSMQCT |
| 602 | DTCVMYTQD |
| 603 | DTDYNHNSA |
| 604 | DTFTGIMHQ |
| 605 | DTGKPITTA |
| 606 | DTHHTHWQY |
| 607 | DTHIFIRHA |
| 608 | DTHKYTENR |
| 609 | DTHLQMQVI |
| 610 | DTITFKQQH |
| 611 | DTMNHRMTP |
| 612 | DTMPTFSTM |
| 613 | DTMQQVKFN |
| 614 | DTPLCNILC |
| 615 | DTQQYWMQD |
| 616 | DTRCWNHNA |
| 617 | DTRCWNVNC |
| 618 | DTRDCNFFN |
| 619 | DTTDCKKAS |
| 620 | DVAELKSLF |
| 621 | DVAHMQWRG |
| 622 | DVAKFMQML |
| 623 | DVALKNMFS |
| 624 | DVAVKKEYE |
| 625 | DVCAFRLMN |
| 626 | DVCCWTLAP |
| 627 | DVCDEHILY |
| 628 | DVCERMGFT |
| 629 | DVCNFMYSG |
| 630 | DVCRKNVSD |
| 631 | DVDFNELCE |
| 632 | DVDHPCMMF |
| 633 | DVDLNELCP |
| 634 | DVFSWHKDQ |
| 635 | DVHDSQLCY |
| 636 | DVIHTTHSG |
| 637 | DVKMKLSEQ |
| 638 | DVLIATMTC |
| 639 | DVLISTMAC |
| 640 | DVNKHSFNG |
| 641 | DVVKPTLMQ |
| 642 | DVVTPKLMQ |
| 643 | DVWLMRMCA |
| 644 | DVYFIRNAE |
| 645 | DWAEKVWGF |
| 646 | DWCEMKVGD |
| 647 | DWFMAFCGH |
| 648 | DWFQAIIHA |
| 649 | DWGFWMKHE |
| 650 | DWKFNLKDE |
| 651 | DWKPSVCQC |
| 652 | DWMLHADLL |
| 653 | DWRTFQAIA |
| 654 | DWRTPQAIA |
| 655 | DWVPEGHFP |
| 656 | DYAIENSAF |
| 657 | DYDHLDTWT |
| 658 | DYDSIQRQE |
| 659 | DYHPWWVTS |
| 660 | DYILPVIAI |
| 661 | DYILPVTAM |
| 662 | DYLSQFFGI |
| 663 | DYLWMNQEK |
| 664 | DYNRNNRYL |
| 665 | DYQPLSCYP |
| 666 | DYQTMTEHE |
| 667 | DYRDSHVAG |
| 668 | DYSPIDCEQ |
| 669 | DYSYRHIGE |
| 670 | DYTGMHQNM |
| 671 | DYTMMHQNC |
| 672 | DYTTNCMVE |
| 673 | DYVSLINEI |
| 674 | DYVYTNAEA |
| 675 | DYWLMHKID |
| 676 | EACFKDFWF |
| 677 | EACGMMTYC |
| 678 | EACGMTTMC |
| 679 | EACHPDLTP |
| 680 | EACMVNAAF |
| 681 | EACYWGHCP |
| 682 | EADEWWTIL |
| 683 | EADSRANAQ |
| 684 | EAEHMNWLM |
| 685 | EAEPFKTIQ |
| 686 | EAFNAFAGE |
| 687 | EAFNAFATR |
| 688 | EAFVHYCIN |
| 689 | EAGSCAMRV |
| 690 | EAHDDEYQC |
| 691 | EAHTNSICK |
| 692 | EAIPHIMDM |
| 693 | EAITDMYQP |
| 694 | EAITQFAVI |
| 695 | EAKWKECPS |
| 696 | EAMEQPYMF |
| 697 | EAMGYQAVE |
| 698 | EAMPVQKGW |
| 699 | EANVREHFC |
| 700 | EARTTRDCG |
| 701 | EARYSEEVW |
| 702 | EASMPYASM |
| 703 | EASWKMCPS |
| 704 | EATWLQRIM |
| 705 | EAVMWTCNS |
| 706 | EAWFYHADD |
| 707 | EAWMPSASG |
| 708 | EAWMYHQFH |
| 709 | EAWSKLEQP |
| 710 | EAWSMLDAL |
| 711 | EAWWYNFYF |
| 712 | EAYLYNIPM |
| 713 | ECDCGHVHL |
| 714 | ECHPYKTVA |
| 715 | ECLARQRHV |
| 716 | ECTQYVMCN |
| 717 | ECTWNMDAW |
| 718 | ECVSHIPGK |
| 719 | ECWSYQMVD |
| 720 | EDEQHLWND |
| 721 | EEDPLNGWQ |
| 722 | EEEPIWWQV |
| 723 | EEEWIWWQC |
| 724 | EEEWLNGWQ |
| 725 | EELETWIPY |
| 726 | EEMADGDAQ |
| 727 | EEMADGDAR |
| 728 | EEMEGLASE |
| 729 | EEPWQCMTA |
| 730 | EFDTTPCLF |
| 731 | EFEHGNAAS |
| 732 | EFFMVANSP |
| 733 | EFHMMGHFF |
| 734 | EFHYWFRPS |
| 735 | EFISLKSYE |
| 736 | EFLCINHGE |
| 737 | EFLVSGDSG |
| 738 | EFNALSFNV |
| 739 | EFNKLSFNH |
| 740 | EFNNTMMGQ |
| 741 | EFRHLTSMP |
| 742 | EFRHNQMNT |
| 743 | EFSPCVKMR |
| 744 | EFSYNVVHF |
| 745 | EFTKYSNAV |
| 746 | EFTMNQHMW |
| 747 | EFTTNYCHG |
| 748 | EFWVTECDQ |
| 749 | EGCQIPWTA |
| 750 | EGDPFKLQK |
| 751 | EGKQTNKAV |
| 752 | EGLQGNNYY |
| 753 | EGVQLNTDE |
| 754 | EGYMCMSGH |
| 755 | EGYSTHALG |
| 756 | EHAWLWMQS |
| 757 | EHCWYQFGA |
| 758 | EHFKAGCLH |
| 759 | EHGYMRCTK |
| 760 | EHHVTTGCT |
| 761 | EHKHMGCMN |
| 762 | EHKPCHASD |
| 763 | EHMQAKSAW |
| 764 | EHNHMGCMN |
| 765 | EHNWVQRAE |
| 766 | EHQLVGDWF |
| 767 | EHQLVGDWL |
| 768 | EHSWFISYN |
| 769 | EHSWINNMN |
| 770 | EHTFGPVYR |
| 771 | EHTQRGAAP |
| 772 | EHTQRGCAG |
| 773 | EHVQPMQWN |
| 774 | EHWHQMSPS |
| 775 | EHYSAHFFC |
| 776 | EIASKMNQL |
| 777 | EIDSKMHQL |
| 778 | EIGPQPNQD |
| 779 | EIGSVKHWE |
| 780 | EIHKRIAMT |
| 781 | EIKFSAGGI |
| 782 | EILKIDYQV |
| 783 | EINSLMYVD |
| 784 | EISCMHMSM |
| 785 | EISFEYCHE |
| 786 | EISPQENQD |
| 787 | EITEEALCD |
| 788 | EITHYYSTD |
| 789 | EIWSALAAN |
| 790 | EIWVREVNS |
| 791 | EKAHVQYAY |
| 792 | EKDTPTCKM |
| 793 | EKEMISTLE |
| 794 | EKIMVNRAF |
| 795 | EKLNAVQFC |
| 796 | EKMNCLVRW |
| 797 | EKNLYWTWE |
| 798 | EKRINTSPG |
| 799 | EKYRFSNGY |
| 800 | ELCTNTMAS |
| 801 | ELGTMTHSE |
| 802 | ELMSMIIVE |
| 803 | ELQEATHYP |
| 804 | ELRDYHIGM |
| 805 | ELRHAEQSQ |
| 806 | ELRISEQSQ |
| 807 | ELWDYHIGM |
| 808 | ELYMSNWMM |
| 809 | ELYSLAEQI |
| 810 | EMAKYMWDP |
| 811 | EMAMNLKDT |
| 812 | EMAVANSTH |
| 813 | EMCKGLCTT |
| 814 | EMDWTHVSH |
| 815 | EMESLNLLQ |
| 816 | EMESRNLLQ |
| 817 | EMFFYFGSQ |
| 818 | EMHKVPSGM |
| 819 | EMIHIGHRE |
| 820 | EMKTQCHGE |
| 821 | EMKTQTHFE |
| 822 | EMKTTQDAE |
| 823 | EMLPTQLNC |
| 824 | EMLVAHFGN |
| 825 | EMMCRCWLM |
| 826 | EMMQQAFAQ |
| 827 | EMNRYWTWE |
| 828 | EMSEEFSHA |
| 829 | EMYAFWQRG |
| 830 | EMYMMQTDQ |
| 831 | EMYPLFDAI |
| 832 | EMYVTKADD |
| 833 | ENAQMECLM |
| 834 | ENCAVTFCA |
| 835 | ENDQANLYA |
| 836 | ENDRCHTCA |
| 837 | ENDYVHGCM |
| 838 | ENFIQNCPG |
| 839 | ENGPLLCAR |
| 840 | ENKPVDQDK |
| 841 | ENLLEWKKA |
| 842 | ENNTWMQWG |
| 843 | ENQPANGWY |
| 844 | ENQQGNQCV |
| 845 | ENRLVQEVQ |
| 846 | ENRMFQDSE |
| 847 | ENSFYAGAG |
| 848 | ENTTTVAPC |
| 849 | ENVHINQAM |
| 850 | EPVSLQYMD |
| 851 | EPWKTHQQN |
| 852 | EQAEYDSCD |
| 853 | EQAGVASMW |
| 854 | EQCAVWDCM |
| 855 | EQFVSMNTG |
| 856 | EQGFVMFNG |
| 857 | EQGPLGSWF |
| 858 | EQGQLWSWF |
| 859 | EQNEETPFG |
| 860 | EQRNMGERA |
| 861 | EQRYCNSYV |
| 862 | EQTGVNVCL |
| 863 | ERELASATH |
| 864 | ERHPINQAL |
| 865 | ERQAHNNYA |
| 866 | ERTVNLRDC |
| 867 | ESCKTIRLE |
| 868 | ESCLSQNRA |
| 869 | ESEPFECCA |
| 870 | ESESGHMEG |
| 871 | ESGMIAVPH |
| 872 | ESHLWLAME |
| 873 | ESHSTQTYV |
| 874 | ESHYRCMCN |
| 875 | ESISSGVEG |
| 876 | ESLSFQTLV |
| 877 | ESMPFLDEA |
| 878 | ESNPVSMDV |
| 879 | ESTHMLYEM |
| 880 | ESTPQFTSG |
| 881 | ESTQRFDKM |
| 882 | ESTSGWSMA |
| 883 | ESTSNWAMA |
| 884 | ESVLKNQFE |
| 885 | ESWMKLEWQ |
| 886 | ETAIRDLTQ |
| 887 | ETCLSMHYL |
| 888 | ETDVSWCES |
| 889 | ETEFRQLDG |
| 890 | ETEVKSHWD |
| 891 | ETFIFPGAG |
| 892 | ETFVRHADY |
| 893 | ETGKTIYHQ |
| 894 | ETGPRQDLF |
| 895 | ETHFVQGRM |
| 896 | ETHILDQFC |
| 897 | ETHIVFGQW |
| 898 | ETHNKHTDY |
| 899 | ETISSGIEG |
| 900 | ETLAKLHCA |
| 901 | ETLSRSDIC |
| 902 | ETNEVMVQQ |
| 903 | ETRVSWCEW |
| 904 | ETSLSGNQY |
| 905 | ETSTSCAWL |
| 906 | ETTHYYSTF |
| 907 | ETTLHDLWL |
| 908 | ETTLQDLWE |
| 909 | ETVICDGVT |
| 910 | EVCSIHWMG |
| 911 | EVEVLEMGH |
| 912 | EVEVMVYSW |
| 913 | EVEWYYGQS |
| 914 | EVFEEYWSL |
| 915 | EVHGRNQDN |
| 916 | EVHGWNQDN |
| 917 | EVHKGAVMD |
| 918 | EVHKYCCNS |
| 919 | EVHSTQTAV |
| 920 | EVIRSPIEG |
| 921 | EVKPIGHSQ |
| 922 | EVLLSTDEA |
| 923 | EVLVAEWQG |
| 924 | EVLVAFATN |
| 925 | EVLVAVWQG |
| 926 | EVMPYHRTH |
| 927 | EVNQQMKAK |
| 928 | EVRQWQDED |
| 929 | EVSFYAGAI |
| 930 | EVSRQMYSQ |
| 931 | EVTDPCECA |
| 932 | EVTTIAQDH |
| 933 | EVVRRCYEC |
| 934 | EWCLLHVGH |
| 935 | EWEQTWRAP |
| 936 | EWFQAGICD |
| 937 | EWKHDRNDI |
| 938 | EWKHYRNDI |
| 939 | EWQGLQQFT |
| 940 | EWSGLQSCF |
| 941 | EWVFQHLSS |
| 942 | EWYCFLDSG |
| 943 | EYACHNRMP |
| 944 | EYCEFRQMD |
| 945 | EYCKYSLGL |
| 946 | EYEHMMWSQ |
| 947 | EYKSYGNCQ |
| 948 | EYLWEAIEH |
| 949 | EYMQQAFAW |
| 950 | EYNIYIATD |
| 951 | EYQISKTMC |
| 952 | EYQISNTMC |
| 953 | EYSTLPMTT |
| 954 | EYTKYQLGL |
| 955 | EYVSLINEI |
| 956 | EYWLNSSQA |
| 957 | FACWILYIG |
| 958 | FAEIHMQYH |
| 959 | FAEPLENWM |
| 960 | FAGFALHDS |
| 961 | FAGMYRRNS |
| 962 | FAILSGQTL |
| 963 | FAIWNYESK |
| 964 | FALSRNGNG |
| 965 | FALTCEEAP |
| 966 | FALTCNEAG |
| 967 | FAMKVLDIQ |
| 968 | FAMLGYWVH |
| 969 | FANCSTHQD |
| 970 | FAQLNQASM |
| 971 | FASRQGDNH |
| 972 | FASTTAECM |
| 973 | FATAHQKCW |
| 974 | FATQNQSPS |
| 975 | FAVMTSTEN |
| 976 | FCAGCDMAN |
| 977 | FCCHLAAHK |
| 978 | FCCSKANDC |
| 979 | FCDVVKHHL |
| 980 | FCDYHNTIE |
| 981 | FCITGNACA |
| 982 | FCNSYTMLP |
| 983 | FCPNSQMDG |
| 984 | FCQNPTQAM |
| 985 | FCVNQQTCQ |
| 986 | FDALMCWKI |
| 987 | FDANDCRPS |
| 988 | FDKCHMADW |
| 989 | FEACVTECL |
| 990 | FEKTMVAMH |
| 991 | FFGNVMKEQ |
| 992 | FFGWFHMNN |
| 993 | FFHVAWLSI |
| 994 | FFLKLNDVP |
| 995 | FFNHDNIGN |
| 996 | FFNNISTYF |
| 997 | FFNPTTQQN |
| 998 | FFPWEWECW |
| 999 | FFSHIQAAD |
| 1000 | FFSMVENCG |
| 1001 | FFTNRNHEE |
| 1002 | FFVKMMCSH |
| 1003 | FFVTWICRL |
| 1004 | FFYFLDILK |
| 1005 | FFYSTNFGM |
| 1006 | FGAEMHCPM |
| 1007 | FGDFFFNHN |
| 1008 | FGKWLTRLH |
| 1009 | FGNSMMLQS |
| 1010 | FHAMKHVLE |
| 1011 | FHLHTHRED |
| 1012 | FHNSKSEKH |
| 1013 | FHSFIHQHE |
| 1014 | FHTNYICQE |
| 1015 | FHVKVSCDS |
| 1016 | FICHVKEGA |
| 1017 | FICRHIHGI |
| 1018 | FICSSQCGA |
| 1019 | FIEFTIGEF |
| 1020 | FIGLKNAHL |
| 1021 | FIPNKWLGN |
| 1022 | FIQMTMSSD |
| 1023 | FITQYPNAE |
| 1024 | FKFMVDTSS |
| 1025 | FKIECGLFQ |
| 1026 | FKNDSVDHE |
| 1027 | FLEYAVQNQ |
| 1028 | FLQWTESGD |
| 1029 | FLVGQHVHP |
| 1030 | FLVVNHFGH |
| 1031 | FMECLKDTK |
| 1032 | FMEDKQVFS |
| 1033 | FMEYYLWYC |
| 1034 | FMSLVNAGE |
| 1035 | FMTMLGCSM |
| 1036 | FNARRDTWF |
| 1037 | FNGYYETQG |
| 1038 | FNQFEFVSA |
| 1039 | FNRCMEDRG |
| 1040 | FNSNLGAAT |
| 1041 | FNSSYGTNQ |
| 1042 | FNTQLLMSG |
| 1043 | FPEKAIVGQ |
| 1044 | FPEPFPMWG |
| 1045 | FPMPFPMWK |
| 1046 | FQAMIMTNY |
| 1047 | FQAVCIWIS |
| 1048 | FQCSVHKFV |
| 1049 | FQECEAPQH |
| 1050 | FQEVFSFFN |
| 1051 | FQFWRQIME |
| 1052 | FQIPLKAVA |
| 1053 | FQSMQHDNN |
| 1054 | FSADSMCSF |
| 1055 | FSAPITAHF |
| 1056 | FSAPLFHCA |
| 1057 | FSEPLFHLF |
| 1058 | FSEVKGMSG |
| 1059 | FSFRTARQQ |
| 1060 | FSFRTARYL |
| 1061 | FSGTVYCWC |
| 1062 | FSLPNNCDD |
| 1063 | FSNTVYKWC |
| 1064 | FSTHLTDAC |
| 1065 | FSTSYCHED |
| 1066 | FTDNPNWYA |
| 1067 | FTERTKCAA |
| 1068 | FTEYEHCAS |
| 1069 | FTHQRNALT |
| 1070 | FTHTFEACG |
| 1071 | FTIIKNNCL |
| 1072 | FTMDINLND |
| 1073 | FTMQSGDYH |
| 1074 | FTNFKMNMY |
| 1075 | FTNQLPEAN |
| 1076 | FTNYKYSFE |
| 1077 | FTQQEFHGQ |
| 1078 | FTTDYQMIA |
| 1079 | FTVDQLNWQ |
| 1080 | FTWHIESKF |
| 1081 | FTYGFQTIN |
| 1082 | FTYNFMNSW |
| 1083 | FVDEAFAWQ |
| 1084 | FVGFALHDS |
| 1085 | FVHASMINA |
| 1086 | FVIGHHLFP |
| 1087 | FVRGPWQCE |
| 1088 | FVRWSPYPI |
| 1089 | FVSAMSGPC |
| 1090 | FVSKSEEYH |
| 1091 | FVSLMSGPN |
| 1092 | FVTVMQFQD |
| 1093 | FVTVTACDG |
| 1094 | FVWMTGLNM |
| 1095 | FWELNGPKN |
| 1096 | FWGQYHVQG |
| 1097 | FWHEYNFTN |
| 1098 | FWKMLGHNH |
| 1099 | FWMQTEHGK |
| 1100 | FWMQTEHGT |
| 1101 | FWNFFHSHL |
| 1102 | FWNMVDTGG |
| 1103 | FWNQQSQCF |
| 1104 | FWQQYNEAN |
| 1105 | FWRSLDMQY |
| 1106 | FWSNIGAAP |
| 1107 | FWSQYDLMY |
| 1108 | FWTSYDSSH |
| 1109 | FYCSKMRGL |
| 1110 | FYYNYMHHS |
| 1111 | GAAQFGAFY |
| 1112 | GAFIIQKTP |
| 1113 | GAFMGLMTQ |
| 1114 | GAFVGLMTQ |
| 1115 | GAHMHDTHL |
| 1116 | GAKTYGEME |
| 1117 | GASFYEGME |
| 1118 | GATECFNPC |
| 1119 | GATQCFNPF |
| 1120 | GCDKWLGLC |
| 1121 | GCELISVGQ |
| 1122 | GCTPRQEMP |
| 1123 | GDMGCNVKL |
| 1124 | GEEVGCIWG |
| 1125 | GEKTYGEMY |
| 1126 | GEQQMPFIC |
| 1127 | GEYNERMHI |
| 1128 | GFANFMMNF |
| 1129 | GFANFNMTD |
| 1130 | GFDNVSFSY |
| 1131 | GFEEMDAQM |
| 1132 | GFEEQLTSK |
| 1133 | GFEMSTSHS |
| 1134 | GFFLTKQDG |
| 1135 | GFFTQMSQS |
| 1136 | GFGTYLSMH |
| 1137 | GFIDYQMQD |
| 1138 | GFMHYCSHV |
| 1139 | GFMLPIYWC |
| 1140 | GFTFMEASH |
| 1141 | GGAGVHHHT |
| 1142 | GGQTIKEHF |
| 1143 | GGWSDSNDA |
| 1144 | GGYNERMHI |
| 1145 | GHCYTQQQH |
| 1146 | GHDFTQFQE |
| 1147 | GHEDLLAMD |
| 1148 | GHESCGLWT |
| 1149 | GHLECCWSI |
| 1150 | GHSFRYACD |
| 1151 | GHVQAECMY |
| 1152 | GIADYQQQG |
| 1153 | GIFFCQEEK |
| 1154 | GIGWLKHFE |
| 1155 | GIICVTRDD |
| 1156 | GIKCERDAD |
| 1157 | GIKLTGTDH |
| 1158 | GILELHFGV |
| 1159 | GILHLHQCI |
| 1160 | GILNITMDQ |
| 1161 | GIMCREQCD |
| 1162 | GIMKHQETS |
| 1163 | GIMMQQMDP |
| 1164 | GIQQHAIMA |
| 1165 | GIREQEYCP |
| 1166 | GIRWADHWN |
| 1167 | GIVMMQAMD |
| 1168 | GIVNCTRLG |
| 1169 | GIVPLGTNY |
| 1170 | GIYMNQENA |
| 1171 | GIYPWMTYA |
| 1172 | GKQFDEQLE |
| 1173 | GKQFDEQQM |
| 1174 | GKSPMGEMP |
| 1175 | GLFWMWVDN |
| 1176 | GLIFHQSLS |
| 1177 | GLMSASAHS |
| 1178 | GLMTQQNAD |
| 1179 | GLMTQQNSD |
| 1180 | GLNICKNQQ |
| 1181 | GLNKFMQGP |
| 1182 | GLSCKSAWL |
| 1183 | GLYWQCDGM |
| 1184 | GMEHLWNVD |
| 1185 | GMKFTAQGN |
| 1186 | GMKILRTRK |
| 1187 | GMNFCLASH |
| 1188 | GMRDVFDCY |
| 1189 | GMRYHDDLF |
| 1190 | GMSFYNFFE |
| 1191 | GMSSYTCED |
| 1192 | GMTPRMMGM |
| 1193 | GMTSWGCWE |
| 1194 | GNEGADAEE |
| 1195 | GNEKCGTAV |
| 1196 | GNKSFQYAS |
| 1197 | GNMEQEGCP |
| 1198 | GNYLYMHQG |
| 1199 | GPFSFLRGA |
| 1200 | GPFSFLRGG |
| 1201 | GPNGDAARY |
| 1202 | GQAVSHAFS |
| 1203 | GQFWTNDAA |
| 1204 | GQGVAQQCA |
| 1205 | GQHFVMLSS |
| 1206 | GQHLQIGAE |
| 1207 | GQNTTDRSN |
| 1208 | GQPVCCVCM |
| 1209 | GQQHYGWQQ |
| 1210 | GQSFYTCED |
| 1211 | GQVHTSYYG |
| 1212 | GQVQHECMY |
| 1213 | GRCFMPPGR |
| 1214 | GRVLANCAE |
| 1215 | GSDAIMWDC |
| 1216 | GSDAQMWDH |
| 1217 | GSEHKGIGE |
| 1218 | GSEWRQDMG |
| 1219 | GSFMSCEKN |
| 1220 | GSFQQMASL |
| 1221 | GSFWHNDAA |
| 1222 | GSHNTGAWP |
| 1223 | GSMHNSICY |
| 1224 | GSNDRLDSC |
| 1225 | GSTSMITHA |
| 1226 | GTADKPTGI |
| 1227 | GTASLDVLS |
| 1228 | GTCSMTLDN |
| 1229 | GTESLAVLS |
| 1230 | GTGFWWGCY |
| 1231 | GTIHMYCGW |
| 1232 | GTLEHTSST |
| 1233 | GTMPFWAYD |
| 1234 | GTMTCHYHH |
| 1235 | GTPQGKQRQ |
| 1236 | GTPWKEQFK |
| 1237 | GTQFAQGDN |
| 1238 | GTQVRHHDY |
| 1239 | GTQWQVSHW |
| 1240 | GTQWTQWMK |
| 1241 | GTSWELWNA |
| 1242 | GTVLKMNDI |
| 1243 | GTVQAIVCT |
| 1244 | GTWINEQMG |
| 1245 | GVADKPTGY |
| 1246 | GVEGHGQFD |
| 1247 | GVFYVGHWQ |
| 1248 | GVINMLASD |
| 1249 | GVMSCKVIG |
| 1250 | GVMSMSFPV |
| 1251 | GVQHYQLGM |
| 1252 | GVQHYWLGT |
| 1253 | GVQYGSQHF |
| 1254 | GVTTSNYCP |
| 1255 | GVTVCWSNQ |
| 1256 | GVTYHHRQC |
| 1257 | GVVATQRSG |
| 1258 | GVYDTLSSF |
| 1259 | GVYQQFHWF |
| 1260 | GWDWIMCNK |
| 1261 | GWFTYDKQQ |
| 1262 | GWHILPVME |
| 1263 | GWIFITGAD |
| 1264 | GWKHICVHG |
| 1265 | GWNNRDSGP |
| 1266 | GWNQHHSSE |
| 1267 | GWVQSMCMS |
| 1268 | GWYSLAVAN |
| 1269 | GYCMRLFGI |
| 1270 | GYCPCFHAG |
| 1271 | GYERADCWM |
| 1272 | GYESFLRDQ |
| 1273 | GYIPTQSMY |
| 1274 | GYISYGTQE |
| 1275 | GYKMMDCSM |
| 1276 | GYLSFMHNN |
| 1277 | GYMQTLEGL |
| 1278 | GYQNFLDYF |
| 1279 | GYTSMITHV |
| 1280 | GYVQQSKGE |
| 1281 | GYVWLGAMP |
| 1282 | HAALYTNQN |
| 1283 | HAAPGMIHS |
| 1284 | HACFNHFPC |
| 1285 | HACLMYWYD |
| 1286 | HAEELGDCY |
| 1287 | HAEIQGHQE |
| 1288 | HAELLGAFE |
| 1289 | HAHVFIWYA |
| 1290 | HAHVFIWYT |
| 1291 | HAILLDEMR |
| 1292 | HAISIWQTN |
| 1293 | HAKLFPTMI |
| 1294 | HASAMECIS |
| 1295 | HASGFMMQS |
| 1296 | HASTAIMCP |
| 1297 | HATPVCKEY |
| 1298 | HATTCDFDF |
| 1299 | HAYPILQMD |
| 1300 | HCAMTQRFD |
| 1301 | HCAVCQWQA |
| 1302 | HCETFMMQF |
| 1303 | HCNFDIPGA |
| 1304 | HCQPFTGHV |
| 1305 | HCSLYAQER |
| 1306 | HCSNVEFYQ |
| 1307 | HCSPNNCLE |
| 1308 | HCSPNNCPE |
| 1309 | HCVEFMQSN |
| 1310 | HDDAQLDNS |
| 1311 | HDEAQLDNS |
| 1312 | HDFDNPSMY |
| 1313 | HDGPSAKPN |
| 1314 | HDHTPLQSP |
| 1315 | HDNSAMWMV |
| 1316 | HDTMEWGCH |
| 1317 | HDTMEWGFH |
| 1318 | HECWQMTND |
| 1319 | HESMAWTLL |
| 1320 | HFCQYQSST |
| 1321 | HFDNYQRFC |
| 1322 | HFFHNMDYH |
| 1323 | HFGPTNCSM |
| 1324 | HFHQNFHFF |
| 1325 | HFMEMLING |
| 1326 | HFWMMECSG |
| 1327 | HFWVINGYE |
| 1328 | HGCPHFASG |
| 1329 | HGLTIGAAT |
| 1330 | HGSLLSTCH |
| 1331 | HHDSCYVVP |
| 1332 | HHESHLCGY |
| 1333 | HHQHVDNHG |
| 1334 | HHQWLRVME |
| 1335 | HHWPQTPLL |
| 1336 | HIANNFDWE |
| 1337 | HIAQCDVYL |
| 1338 | HIDDWAHGR |
| 1339 | HIDLMQMEY |
| 1340 | HIENKYAHI |
| 1341 | HIEVCTLGD |
| 1342 | HIFMDEMAY |
| 1343 | HIGYKDSLS |
| 1344 | HILIMQGVS |
| 1345 | HIQEELEEQ |
| 1346 | HISEFNRCT |
| 1347 | HISFCSEYW |
| 1348 | HIVQCDVIL |
| 1349 | HIYFQEAQS |
| 1350 | HKGTHAFVM |
| 1351 | HKYCRLSEE |
| 1352 | HLAPYCQQE |
| 1353 | HLDDIISFN |
| 1354 | HLGMWLAPV |
| 1355 | HLQVCNIYH |
| 1356 | HLSFNNWCR |
| 1357 | HMATLAHEA |
| 1358 | HMVIHAIPD |
| 1359 | HMVTLAHGA |
| 1360 | HNASNHECT |
| 1361 | HNEDLGDCY |
| 1362 | HNENTHWFN |
| 1363 | HNGCLMDVA |
| 1364 | HPHDTMKLT |
| 1365 | HPVCCLEQA |
| 1366 | HPYTAKWDV |
| 1367 | HQEVNPTPA |
| 1368 | HQEYFDANQ |
| 1369 | HQISVNNTL |
| 1370 | HQMEYSDFL |
| 1371 | HQMEYSDLL |
| 1372 | HQVQKYRMC |
| 1373 | HRDYFFTYD |
| 1374 | HSASGICCN |
| 1375 | HSCGTYYWA |
| 1376 | HSEMSNILM |
| 1377 | HSFEKKIPL |
| 1378 | HSVVVYEHA |
| 1379 | HSWINNQEH |
| 1380 | HTAQTYSTN |
| 1381 | HTEAHLSAC |
| 1382 | HTECDIQQK |
| 1383 | HTECKTIMH |
| 1384 | HTGCLLDVA |
| 1385 | HTIEGKHMN |
| 1386 | HTIHYGEAS |
| 1387 | HTINMPRWV |
| 1388 | HTMDYNTCR |
| 1389 | HTNQMWGMF |
| 1390 | HTNSYMEIE |
| 1391 | HTNYMQKEY |
| 1392 | HTQLKNCTG |
| 1393 | HTSFTNCEC |
| 1394 | HTSHQGHAE |
| 1395 | HTSLDSWFN |
| 1396 | HTTLCDPCG |
| 1397 | HTTNYGEAS |
| 1398 | HVAVNGFYD |
| 1399 | HVDGIWRDQ |
| 1400 | HVDQSLKYG |
| 1401 | HVELNMKGV |
| 1402 | HVEVPNTDA |
| 1403 | HVFQEGCCI |
| 1404 | HVGTDCMAA |
| 1405 | HVHQALTIS |
| 1406 | HVKVPNTDA |
| 1407 | HVLNGTGGS |
| 1408 | HVMPYMWVG |
| 1409 | HVMQYMWPG |
| 1410 | HVMRYYEPY |
| 1411 | HVNTYQLRG |
| 1412 | HVSAMECIS |
| 1413 | HVSPIQDNM |
| 1414 | HWLSCEKRW |
| 1415 | HWTLCDPEG |
| 1416 | HWVSTLADY |
| 1417 | HYAEITYRQ |
| 1418 | HYCPCHNKY |
| 1419 | HYDLSTCAL |
| 1420 | HYEWADHQW |
| 1421 | HYMQRKEWR |
| 1422 | HYTEVQKTP |
| 1423 | HYVALDAGS |
| 1424 | HYVMFQMSN |
| 1425 | HYVSMMLDE |
| 1426 | HYVVRHEDP |
| 1427 | IAAQPITNE |
| 1428 | IACYEPVGS |
| 1429 | IAEFLQCDY |
| 1430 | IAHNNFEPT |
| 1431 | IAHVVEQMG |
| 1432 | IALSATKDK |
| 1433 | IANVNNGTH |
| 1434 | IATKSGLYH |
| 1435 | IATLHMLSN |
| 1436 | IATWMWKYS |
| 1437 | IAYHTKSTI |
| 1438 | ICACFNKAY |
| 1439 | ICGFFCQQQ |
| 1440 | ICIQSNGRE |
| 1441 | ICLLEAGEK |
| 1442 | ICMQNAMSW |
| 1443 | ICMWKQYCS |
| 1444 | ICQHNGVAY |
| 1445 | ICREQIKWM |
| 1446 | ICRYALLHA |
| 1447 | ICSHSWFQA |
| 1448 | IDAWGHFSE |
| 1449 | IDDFRIVMH |
| 1450 | IDEQCKFGH |
| 1451 | IECSPREYI |
| 1452 | IEDVWECPY |
| 1453 | IEQQGSPLL |
| 1454 | IEYCQGMNF |
| 1455 | IEYYPTAEQ |
| 1456 | IFAHSNCCE |
| 1457 | IFALFDRYN |
| 1458 | IFENHDAAM |
| 1459 | IFILWQCKE |
| 1460 | IFLSKIPCQ |
| 1461 | IFNTRFLRE |
| 1462 | IFSSGGADA |
| 1463 | IFSSGGAYE |
| 1464 | IFTAKNEEM |
| 1465 | IFVIKQQCI |
| 1466 | IFVIYHQSG |
| 1467 | IFYAGDCTF |
| 1468 | IGAEQKVGI |
| 1469 | IGCLAVNHI |
| 1470 | IGGIIGNWG |
| 1471 | IGLSRNSNG |
| 1472 | IGQRIAGYA |
| 1473 | IGVERDYYA |
| 1474 | IGYQIMDME |
| 1475 | IHCDIQCQF |
| 1476 | IHEFHIAAM |
| 1477 | IHNFYYAST |
| 1478 | IHNHYTACQ |
| 1479 | IHQSFQQWE |
| 1480 | IHSQCQQGQ |
| 1481 | IHSYKDAHL |
| 1482 | IHTQTLISE |
| 1483 | IIAQQMRHH |
| 1484 | IIGSCQSFY |
| 1485 | IIHLPDHCR |
| 1486 | IILQNMKSW |
| 1487 | IIMQNMMSW |
| 1488 | IIPQKCSNP |
| 1489 | IISECQFGG |
| 1490 | IITCMDGYF |
| 1491 | IITMDLCTD |
| 1492 | IIWLGSIRN |
| 1493 | IIYHRTNAS |
| 1494 | IIYQLDCAT |
| 1495 | IKDHYIMQE |
| 1496 | IKQVFNQIA |
| 1497 | IKTNDQALL |
| 1498 | IKVQIDQIE |
| 1499 | ILAKWEVCE |
| 1500 | ILEQFYKMG |
| 1501 | ILERHLCGF |
| 1502 | ILHLEHPSD |
| 1503 | ILPFFCCGL |
| 1504 | ILRCVCDYP |
| 1505 | ILSFYWGDY |
| 1506 | ILTKWEVCE |
| 1507 | IMASVDICA |
| 1508 | IMCYKMCEF |
| 1509 | IMDEIHYMM |
| 1510 | IMDLITYAQ |
| 1511 | IMDMIYDCG |
| 1512 | IMDSRLTVA |
| 1513 | IMETADCHM |
| 1514 | IMGLGMRAD |
| 1515 | IMGLRMRAD |
| 1516 | IMGPAMNYD |
| 1517 | IMMANQLSC |
| 1518 | IMTPLAGGH |
| 1519 | IMTPLASGH |
| 1520 | IMTTENAAP |
| 1521 | IMVERWQHA |
| 1522 | INCQTQKEM |
| 1523 | INDHAQIVK |
| 1524 | INEDAQEKM |
| 1525 | INGSRACSY |
| 1526 | INMVSMYAY |
| 1527 | IPALKEGQI |
| 1528 | IPAPIHVNA |
| 1529 | IPDLHDHMG |
| 1530 | IPGTMSHTA |
| 1531 | IPLAMALWT |
| 1532 | IPMGWEFPE |
| 1533 | IPTMQWWNE |
| 1534 | IPWMERSAS |
| 1535 | IQEHLNACE |
| 1536 | IQLGCSAFH |
| 1537 | IQQQMSMCG |
| 1538 | IRDMFEQYT |
| 1539 | IREPTEPYC |
| 1540 | IRLMTPDEN |
| 1541 | IRLPMNSAH |
| 1542 | IRSMSNIME |
| 1543 | IRTLFNITA |
| 1544 | IRTNPWFHE |
| 1545 | ISDCVVWTY |
| 1546 | ISDLGIMWI |
| 1547 | ISEEIVSFE |
| 1548 | ISEGQAESR |
| 1549 | ISELFGAAF |
| 1550 | ISELFGEAE |
| 1551 | ISFGMEAMS |
| 1552 | ISGEGHQAV |
| 1553 | ISGHAQVQP |
| 1554 | ISGNAWGSL |
| 1555 | ISGWRMPCD |
| 1556 | ISNLLCWCP |
| 1557 | ISNPLYQVS |
| 1558 | ISQEYVSLQ |
| 1559 | ISQHNTFCS |
| 1560 | ISQVDWKCH |
| 1561 | ISRSKDAGM |
| 1562 | ISSGCWQFD |
| 1563 | ISVGQWEFI |
| 1564 | ISVIQPQFA |
| 1565 | ISYFTMAAQ |
| 1566 | ISYSSFDCH |
| 1567 | ITCSNHAMM |
| 1568 | ITDLLNVWG |
| 1569 | ITDQLCHSE |
| 1570 | ITEHVNFVT |
| 1571 | ITEVRQECA |
| 1572 | ITHKSETMM |
| 1573 | ITHSMGDNM |
| 1574 | ITHVSGSQL |
| 1575 | ITIYELDSG |
| 1576 | ITLASKSMR |
| 1577 | ITMGPEKWG |
| 1578 | ITMQSHFQH |
| 1579 | ITNKTFNDN |
| 1580 | ITNPFFLDN |
| 1581 | ITQDANLPL |
| 1582 | ITTQQAGQT |
| 1583 | IVAVNGFWD |
| 1584 | IVCESIQVH |
| 1585 | IVCTIAGTQ |
| 1586 | IVDYYMEGG |
| 1587 | IVHFGSSWK |
| 1588 | IVHWLSWMP |
| 1589 | IVIWQGEWI |
| 1590 | IVKSEGQKA |
| 1591 | IVLPENHLG |
| 1592 | IVMKGQEIT |
| 1593 | IVMNSKQMS |
| 1594 | IVMSCFDAD |
| 1595 | IVNHVPGRG |
| 1596 | IVQAHMMMS |
| 1597 | IVQMDGASF |
| 1598 | IVQRDGASC |
| 1599 | IVSKEVEAD |
| 1600 | IVTGHLQEG |
| 1601 | IVYCQGSSF |
| 1602 | IWRDSLHAN |
| 1603 | IYEWMQCSH |
| 1604 | IYKWDNKFH |
| 1605 | IYLHKDAFG |
| 1606 | IYLKAQQDP |
| 1607 | IYMSSVCHC |
| 1608 | IYPLQSFCN |
| 1609 | IYSHFHQGQ |
| 1610 | IYTRMDGYF |
| 1611 | IYVDLVDSL |
| 1612 | IYWFHPKGG |
| 1613 | IYYQIAEHF |
| 1614 | KAANDHHVA |
| 1615 | KACPYYDEW |
| 1616 | KADTEHNTN |
| 1617 | KAIHNMYGP |
| 1618 | KAREDLWRE |
| 1619 | KATVEFEWP |
| 1620 | KAYSLESDG |
| 1621 | KCALYEYEV |
| 1622 | KCDVLYTCQ |
| 1623 | KCEAGMFCY |
| 1624 | KCEELKTME |
| 1625 | KCEGHHYVE |
| 1626 | KCESGIFCY |
| 1627 | KCLEGVNFT |
| 1628 | KCWITEDAN |
| 1629 | KDHDPGNWQ |
| 1630 | KEMDSITCF |
| 1631 | KENAFENAA |
| 1632 | KENAFENAS |
| 1633 | KFELSSMIQ |
| 1634 | KFGVTDTSE |
| 1635 | KFMTCDLHN |
| 1636 | KFMTSDLPN |
| 1637 | KFNEETPFG |
| 1638 | KGISNWSFY |
| 1639 | KGIWQGMDA |
| 1640 | KGKSNWSFY |
| 1641 | KGPCIMQGN |
| 1642 | KGPRIIQGN |
| 1643 | KHKWMVYGA |
| 1644 | KHKWMVYHG |
| 1645 | KHNEMIHWY |
| 1646 | KIDVYDCIA |
| 1647 | KIEDMMAQE |
| 1648 | KIHDCDTQY |
| 1649 | KIHDCQTFY |
| 1650 | KIHESQTFY |
| 1651 | KIIWRAVAC |
| 1652 | KKEAKYRGY |
| 1653 | KKIMVKRAF |
| 1654 | KLAPWQQNC |
| 1655 | KLEHNMLNP |
| 1656 | KLEHNMLYP |
| 1657 | KLELIMQPR |
| 1658 | KLHWMCSFL |
| 1659 | KMAFGSAGV |
| 1660 | KMECFMDAH |
| 1661 | KMEMYAKEW |
| 1662 | KMESYDYSD |
| 1663 | KMQLSEGVP |
| 1664 | KMVDLQHSL |
| 1665 | KMWIDKYFH |
| 1666 | KMYYFYCNS |
| 1667 | KNGNTDTSE |
| 1668 | KNLTGVAHH |
| 1669 | KNWNPWDSP |
| 1670 | KPDEVHNLN |
| 1671 | KPMEWQQHH |
| 1672 | KPTLEWAHE |
| 1673 | KQDAKERIW |
| 1674 | KQDTEVLLG |
| 1675 | KQDVSKWFK |
| 1676 | KQDVSKWQC |
| 1677 | KQLICDVHH |
| 1678 | KQNDHTHMA |
| 1679 | KQNIEQVLH |
| 1680 | KRQAHNHYA |
| 1681 | KSCCIDHQM |
| 1682 | KSEPGFKNH |
| 1683 | KSGIMENDE |
| 1684 | KSGYGELSE |
| 1685 | KSSSSYIWG |
| 1686 | KSTGCPRGG |
| 1687 | KSYPIFNEG |
| 1688 | KTDQCNEAT |
| 1689 | KTEQKLTPT |
| 1690 | KTFLDVQSV |
| 1691 | KTKYSNWRM |
| 1692 | KTLPWYRPH |
| 1693 | KTSHCEAMG |
| 1694 | KTTHHWMTE |
| 1695 | KTTPPWMTE |
| 1696 | KVCSIVADH |
| 1697 | KVDMLDIVD |
| 1698 | KVEDVVLNE |
| 1699 | KVEIKQMDQ |
| 1700 | KVGMDQTAV |
| 1701 | KVPKRAYFE |
| 1702 | KVSQQEGIV |
| 1703 | KVTTETGVP |
| 1704 | KWDMICGYD |
| 1705 | KWDNIMLMN |
| 1706 | KWDYQMQMN |
| 1707 | KWEWSKCYL |
| 1708 | KWMPFDNTF |
| 1709 | KWPVMANLH |
| 1710 | KWTELCNLY |
| 1711 | KWYSFSFRA |
| 1712 | KYDTVAHWE |
| 1713 | KYGESNQCQ |
| 1714 | KYWISQDCA |
| 1715 | LAATSAQCQ |
| 1716 | LACKGTNPT |
| 1717 | LACYKDGGV |
| 1718 | LADRCQCCY |
| 1719 | LAEFEDGGF |
| 1720 | LAGLDSNTA |
| 1721 | LAGPNHDHQ |
| 1722 | LAHTYGRDT |
| 1723 | LAHVSTQFN |
| 1724 | LAIGAEIAL |
| 1725 | LAIHEATYP |
| 1726 | LAIREATYH |
| 1727 | LAISLVDSY |
| 1728 | LALPYDDFS |
| 1729 | LAMYSQYRG |
| 1730 | LAPPYTRSN |
| 1731 | LASFWLNPQ |
| 1732 | LASPSNESH |
| 1733 | LATEHMSWD |
| 1734 | LATHCYGGR |
| 1735 | LATNTYAYS |
| 1736 | LATVQTQAP |
| 1737 | LAVSHANFF |
| 1738 | LAWIETRDG |
| 1739 | LAYLLGHKE |
| 1740 | LAYYSLAFG |
| 1741 | LCAPCGMSV |
| 1742 | LCAQELYMC |
| 1743 | LCAVCQLQA |
| 1744 | LCAVWDKMD |
| 1745 | LCELNSAWN |
| 1746 | LCERFHEDT |
| 1747 | LCFLMIMCD |
| 1748 | LCFLMSNCD |
| 1749 | LCGWAPCSW |
| 1750 | LCMYSQYRS |
| 1751 | LCTLVGMES |
| 1752 | LCTMEGPYR |
| 1753 | LCTNMMDMS |
| 1754 | LCVGLSNCP |
| 1755 | LDLAHSIPA |
| 1756 | LDTKTLANS |
| 1757 | LECQYHNFQ |
| 1758 | LEDRISATF |
| 1759 | LEGSSQFQD |
| 1760 | LEHSSGFMN |
| 1761 | LEVTNCNAA |
| 1762 | LEWFCWIGS |
| 1763 | LEWVCWSGS |
| 1764 | LFAKPDALL |
| 1765 | LFAVHMGYY |
| 1766 | LFCNIGKTF |
| 1767 | LFELTSVQN |
| 1768 | LFEMTYRNW |
| 1769 | LFEYYRRMA |
| 1770 | LFGIAIWYV |
| 1771 | LFHNAQDDR |
| 1772 | LFHYIQRTS |
| 1773 | LFIKVKDTS |
| 1774 | LFKHCAHHN |
| 1775 | LFKHMYENA |
| 1776 | LFKPTQNEF |
| 1777 | LFLGKDAMM |
| 1778 | LFLHDNRFL |
| 1779 | LFLQLYRHC |
| 1780 | LFMPISSAV |
| 1781 | LFMPVQRIC |
| 1782 | LFMQNNNWM |
| 1783 | LFMQSVQQT |
| 1784 | LFNSYSTRE |
| 1785 | LFQKMTYEP |
| 1786 | LFQQTLRWQ |
| 1787 | LFQQYNSPF |
| 1788 | LFRVMYCQE |
| 1789 | LFRYKTSLW |
| 1790 | LFSFYNNTS |
| 1791 | LFSHELRYY |
| 1792 | LFSIMHAME |
| 1793 | LFSQNEACS |
| 1794 | LFTDTKRPE |
| 1795 | LFTLVQSNS |
| 1796 | LFVGMSCEL |
| 1797 | LFVQRYQES |
| 1798 | LFVYDLLFH |
| 1799 | LGELGNSFG |
| 1800 | LGERALRDL |
| 1801 | LGMDCWQWE |
| 1802 | LGNHFNNWM |
| 1803 | LGNPCNLGD |
| 1804 | LGSLCNCWF |
| 1805 | LGSPFYECG |
| 1806 | LGTLMSQHC |
| 1807 | LHFQIDAED |
| 1808 | LHHRVYQDA |
| 1809 | LHPTFWQEK |
| 1810 | LHQDIMMAG |
| 1811 | LHQLHIMQA |
| 1812 | LIALFMDYR |
| 1813 | LIATWVNAN |
| 1814 | LICLAQAWK |
| 1815 | LIDERFVQG |
| 1816 | LIKPFIDKA |
| 1817 | LIMMSNWQD |
| 1818 | LINHGQTSC |
| 1819 | LINQFIACT |
| 1820 | LINSTMVSG |
| 1821 | LISLAAYIE |
| 1822 | LISWKQTNS |
| 1823 | LIYSNIKAQ |
| 1824 | LKAPCQMDR |
| 1825 | LKDELVMLG |
| 1826 | LKGYKPSKF |
| 1827 | LKNVIHDGC |
| 1828 | LKSWFGQSP |
| 1829 | LKVEKVMLG |
| 1830 | LKWPVVNCD |
| 1831 | LLGYAQCST |
| 1832 | LLKDYMNST |
| 1833 | LLKTCDIFR |
| 1834 | LLMGFWMQD |
| 1835 | LLNKYENMG |
| 1836 | LLRFYGCCM |
| 1837 | LMEAASRSY |
| 1838 | LMLTYSDHY |
| 1839 | LMNRGEAND |
| 1840 | LMNYSGSSM |
| 1841 | LMQTFPQKC |
| 1842 | LMRQGVLFH |
| 1843 | LMSSTSAHY |
| 1844 | LMTGFMQMG |
| 1845 | LMTPQVKQA |
| 1846 | LMTTQVKQA |
| 1847 | LMVAKTWDC |
| 1848 | LMVFKQLAN |
| 1849 | LMVHGLVYS |
| 1850 | LMWMTPWDN |
| 1851 | LMYMIGTGP |
| 1852 | LMYMIITGP |
| 1853 | LMYQKDCAQ |
| 1854 | LNCHLTNST |
| 1855 | LNESHPPTD |
| 1856 | LNGHYTVQS |
| 1857 | LNKCCSLFY |
| 1858 | LNMDYNKCQ |
| 1859 | LNNACLSDE |
| 1860 | LNNAGYRPC |
| 1861 | LNVMSIHCC |
| 1862 | LPANGQLLA |
| 1863 | LPHAMQKMY |
| 1864 | LPHDKIKDM |
| 1865 | LPHFWGHSE |
| 1866 | LPHKMQNMY |
| 1867 | LPVAMQISH |
| 1868 | LPVDKIKDC |
| 1869 | LQAFYFHDQ |
| 1870 | LQARVGKVF |
| 1871 | LQDRCVCCY |
| 1872 | LQDTMMANE |
| 1873 | LQHLKKYMV |
| 1874 | LQITHNGWQ |
| 1875 | LQMTHNGCQ |
| 1876 | LQPWWLGMV |
| 1877 | LQSTYKMFT |
| 1878 | LQYSLGQQT |
| 1879 | LRAVWAKMD |
| 1880 | LRDKVDWYA |
| 1881 | LRELYTGMF |
| 1882 | LRIGVLSQF |
| 1883 | LRIPFGAAL |
| 1884 | LRMPFSNGV |
| 1885 | LRRECSTCL |
| 1886 | LRTLQIDSM |
| 1887 | LRTPHNHGL |
| 1888 | LRVDTNQQC |
| 1889 | LRVTHDVCS |
| 1890 | LRVTHNVCS |
| 1891 | LSACTVQNM |
| 1892 | LSAFVSHMK |
| 1893 | LSAKEELSG |
| 1894 | LSCKMTNPT |
| 1895 | LSEESGYCS |
| 1896 | LSFQMVDQQ |
| 1897 | LSFYYCGPH |
| 1898 | LSFYYPLHY |
| 1899 | LSGHTYQDN |
| 1900 | LSHETHMGN |
| 1901 | LSIPYQGLN |
| 1902 | LSKDCVAFR |
| 1903 | LSKDCVTFR |
| 1904 | LSLHYLHHH |
| 1905 | LSLNQKWVH |
| 1906 | LSNMVLAAD |
| 1907 | LSPLLDCGN |
| 1908 | LSPTFNHCE |
| 1909 | LSQAMSPGC |
| 1910 | LSQPINHQM |
| 1911 | LSQPYGAGD |
| 1912 | LSSIWYAAN |
| 1913 | LSSYDAKYH |
| 1914 | LSTMTQGSG |
| 1915 | LSVHTCQEQ |
| 1916 | LSVLAGLGG |
| 1917 | LSVQFNNQS |
| 1918 | LSWETKGCG |
| 1919 | LSWHCGEEN |
| 1920 | LTADPQERF |
| 1921 | LTAVKQEGY |
| 1922 | LTCNCNYWQ |
| 1923 | LTCSKHLQP |
| 1924 | LTEFIQAAQ |
| 1925 | LTEKGMLDC |
| 1926 | LTEKGMLDW |
| 1927 | LTEWLYQEM |
| 1928 | LTGWFNTRD |
| 1929 | LTHILDEFC |
| 1930 | LTISHNVSG |
| 1931 | LTLGMSSHE |
| 1932 | LTLGMSSHK |
| 1933 | LTLPFKPEY |
| 1934 | LTLTWGQTY |
| 1935 | LTMCYESNN |
| 1936 | LTMVGEYVN |
| 1937 | LTRFLNCQR |
| 1938 | LTRWNEEKE |
| 1939 | LTSFVDCVQ |
| 1940 | LTSRYNVTH |
| 1941 | LTSSKEFEH |
| 1942 | LTSYENWGW |
| 1943 | LTTHFVEED |
| 1944 | LTTMVKKAA |
| 1945 | LTTSLNGFD |
| 1946 | LTVGHYVYD |
| 1947 | LTVPNESAF |
| 1948 | LTVSKEFSH |
| 1949 | LTVWQQKME |
| 1950 | LTYLLGHKE |
| 1951 | LVADMYERS |
| 1952 | LVCMQGRSN |
| 1953 | LVDQSGDGV |
| 1954 | LVECSNLVA |
| 1955 | LVGERKNAY |
| 1956 | LVGWTLQHV |
| 1957 | LVITKMLQP |
| 1958 | LVKLATYTH |
| 1959 | LVLPVEFYM |
| 1960 | LVNLATYTH |
| 1961 | LVTTEMGTN |
| 1962 | LVTWAANEQ |
| 1963 | LVVEDWIRC |
| 1964 | LWAAVQIDH |
| 1965 | LWCPKEIER |
| 1966 | LWDTSMLKE |
| 1967 | LWEGLATCL |
| 1968 | LWEKCEFDQ |
| 1969 | LWFAITKER |
| 1970 | LWGSFGASS |
| 1971 | LWGWTLQHQ |
| 1972 | LWIKQHVKG |
| 1973 | LWKGYLKSN |
| 1974 | LWMNTGQYH |
| 1975 | LWNIYGTME |
| 1976 | LWNQQDWCR |
| 1977 | LWNTRGIYN |
| 1978 | LWQYSHAWQ |
| 1979 | LWTPCNHLM |
| 1980 | LWYQMLHGL |
| 1981 | LYCVWPAGT |
| 1982 | LYERYWVKQ |
| 1983 | LYFFMGTQA |
| 1984 | LYFGFPMSG |
| 1985 | LYFNMVQGL |
| 1986 | LYFRMGTVA |
| 1987 | LYGWVDLEG |
| 1988 | LYLQHQIDT |
| 1989 | LYRKIMSIV |
| 1990 | LYSYMLHDR |
| 1991 | LYVMKGIQV |
| 1992 | LYVQSHCAV |
| 1993 | LYWFYLEIH |
| 1994 | MAAEYESCS |
| 1995 | MAFFKSNLH |
| 1996 | MAGHYFNSR |
| 1997 | MAGQWCCPE |
| 1998 | MAHPDQQHY |
| 1999 | MAIEMPLHW |
| 2000 | MAKQEINWI |
| 2001 | MALPVTSIR |
| 2002 | MAMNQPEWS |
| 2003 | MAMPIHDRI |
| 2004 | MAQHAITTH |
| 2005 | MAQKREVGV |
| 2006 | MASPYTHVW |
| 2007 | MATCYMYAD |
| 2008 | MATHGNSKT |
| 2009 | MATVNLRDC |
| 2010 | MAVEFCQSD |
| 2011 | MAYCNHFSD |
| 2012 | MAYHSAQCI |
| 2013 | MAYPTQLIF |
| 2014 | MAYTPEFGN |
| 2015 | MCDDPRAWQ |
| 2016 | MCDEKFSYG |
| 2017 | MCDEKNSMG |
| 2018 | MCEPNQGMQ |
| 2019 | MCGPSLVYA |
| 2020 | MCHNYAGVD |
| 2021 | MCHPYFSDG |
| 2022 | MCLDSIMFG |
| 2023 | MCNGFCGIW |
| 2024 | MCNIHNIWD |
| 2025 | MCNYWITDC |
| 2026 | MCSVYQACM |
| 2027 | MCTADQKSI |
| 2028 | MDDICEFYA |
| 2029 | MDHPCQQHY |
| 2030 | MDNCPPMWN |
| 2031 | MEDLWTVGP |
| 2032 | MEFLIMADE |
| 2033 | MENEANIRG |
| 2034 | MESCKLWGV |
| 2035 | MEVPDFMSY |
| 2036 | MFDLYHDFK |
| 2037 | MFEKRNHWG |
| 2038 | MFEMQYCSP |
| 2039 | MFERMYVVN |
| 2040 | MFHAQIHCM |
| 2041 | MFNMFTEWR |
| 2042 | MFNMLTDSA |
| 2043 | MFQFMECLA |
| 2044 | MFTISGLHA |
| 2045 | MGAEHMCVQ |
| 2046 | MGARHMNQE |
| 2047 | MGATKSDDF |
| 2048 | MGDWLGAPT |
| 2049 | MGEGLSFYA |
| 2050 | MGGVANGSS |
| 2051 | MGHWGAEMP |
| 2052 | MGNHLCHYW |
| 2053 | MGNICNVMF |
| 2054 | MGPLLFLFD |
| 2055 | MGSMRIQTD |
| 2056 | MGSPAAAVG |
| 2057 | MGSQQIQTD |
| 2058 | MGTVEKICH |
| 2059 | MGVQLPIVE |
| 2060 | MGWHYGGWS |
| 2061 | MHDSCYVMP |
| 2062 | MHGPSLAYA |
| 2063 | MHHSVVAQF |
| 2064 | MHLEKNEMM |
| 2065 | MHMEVLWGH |
| 2066 | MHMLYKFNC |
| 2067 | MHMSGQSWH |
| 2068 | MHMSKQSWL |
| 2069 | MHMTATIFG |
| 2070 | MHMVKGGWT |
| 2071 | MHMVPGGWM |
| 2072 | MHNAHGIIE |
| 2073 | MHNYYEMCS |
| 2074 | MHQTLQCIG |
| 2075 | MHSFYGLSG |
| 2076 | MHTVYMESI |
| 2077 | MHVNFNEQR |
| 2078 | MHWFYNTGE |
| 2079 | MIAINGGEQ |
| 2080 | MIDLGVIDN |
| 2081 | MIFHSTGAA |
| 2082 | MIHHRDHSI |
| 2083 | MIHPLQSHY |
| 2084 | MIHQMQTLD |
| 2085 | MILLHNQGT |
| 2086 | MIMGYNFEF |
| 2087 | MIMQGVMQA |
| 2088 | MIMQGVVQA |
| 2089 | MINCTAELA |
| 2090 | MINCTAEVA |
| 2091 | MINFNSGTC |
| 2092 | MINFPSMIN |
| 2093 | MINWKAPRA |
| 2094 | MINWKAQCA |
| 2095 | MIQQMMFYT |
| 2096 | MIRGQDNWL |
| 2097 | MIRIMTGQY |
| 2098 | MISAPPDTC |
| 2099 | MITMFDGMC |
| 2100 | MITMYDGMC |
| 2101 | MIYSRGNQP |
| 2102 | MKDIKQVDC |
| 2103 | MKFPNHAEW |
| 2104 | MKGEMEQNA |
| 2105 | MKHPMVNNE |
| 2106 | MKMNYGLVC |
| 2107 | MKSEQQILA |
| 2108 | MKTTMVMAP |
| 2109 | MKWFVFDSN |
| 2110 | MLCKCNADT |
| 2111 | MLLLIPFAP |
| 2112 | MLSTYMPIS |
| 2113 | MLYVNMGDR |
| 2114 | MMAVIRQQS |
| 2115 | MMEQSNWHY |
| 2116 | MMGFKDISC |
| 2117 | MMHWIDMCT |
| 2118 | MMIPWIGIA |
| 2119 | MMLKQGPIY |
| 2120 | MMNPNTEPH |
| 2121 | MMNTWGFMP |
| 2122 | MMNYNDHLH |
| 2123 | MMPGETVRG |
| 2124 | MMQTIQADV |
| 2125 | MMSSNVLAE |
| 2126 | MMVKRDLND |
| 2127 | MMYISCSCT |
| 2128 | MNADVCLTG |
| 2129 | MNEMAQHDR |
| 2130 | MNEQYRHGV |
| 2131 | MNEYKGENY |
| 2132 | MNEYKHGNY |
| 2133 | MNGFTMTYH |
| 2134 | MNGRPEQMA |
| 2135 | MNGRPNQML |
| 2136 | MNINDETQC |
| 2137 | MNMMLMSNS |
| 2138 | MNMTMQYIT |
| 2139 | MNPLGPLLW |
| 2140 | MNRFTHNDQ |
| 2141 | MNSMKPNSV |
| 2142 | MNSWRNTSD |
| 2143 | MPHGWCNTI |
| 2144 | MPHHTSDPF |
| 2145 | MPNQYHSMD |
| 2146 | MQDFMFCIT |
| 2147 | MQDYWTLGA |
| 2148 | MQEKIHMCT |
| 2149 | MQELITFDE |
| 2150 | MQELITFGE |
| 2151 | MQHQNQSVC |
| 2152 | MQKTLCGSY |
| 2153 | MQNYLQHCE |
| 2154 | MQSLYETFG |
| 2155 | MQVMYEASE |
| 2156 | MRDLGVIWN |
| 2157 | MRELMGAYC |
| 2158 | MRIPSGVGQ |
| 2159 | MRNTFNYLC |
| 2160 | MSAARVYDL |
| 2161 | MSAECLHSD |
| 2162 | MSAIHDWGQ |
| 2163 | MSAIPTNGM |
| 2164 | MSAQVDCQF |
| 2165 | MSATLEAAF |
| 2166 | MSDDSTFDF |
| 2167 | MSDDSTVDS |
| 2168 | MSDLVPKWA |
| 2169 | MSDPCVDNH |
| 2170 | MSDPCVDNQ |
| 2171 | MSDQKEHMS |
| 2172 | MSDTCVANQ |
| 2173 | MSEPFNYCG |
| 2174 | MSERCYAGG |
| 2175 | MSEVCPNDI |
| 2176 | MSEVCSNDI |
| 2177 | MSFQKPKWS |
| 2178 | MSGMGDDFP |
| 2179 | MSHEYLFYG |
| 2180 | MSINMPLHW |
| 2181 | MSIPSFMQK |
| 2182 | MSLLIPLAP |
| 2183 | MSNNSVGSY |
| 2184 | MSQFKAYLF |
| 2185 | MSQLVHRCE |
| 2186 | MSQSTYHAG |
| 2187 | MSRHDLNWD |
| 2188 | MSVHFIYMY |
| 2189 | MSVHTWDHY |
| 2190 | MTAILQDNW |
| 2191 | MTAQIGHPI |
| 2192 | MTDPYAGAK |
| 2193 | MTDVHKHLG |
| 2194 | MTELKTFGE |
| 2195 | MTGEMIQNA |
| 2196 | MTGQASDLI |
| 2197 | MTGYGQHDA |
| 2198 | MTITHHVNY |
| 2199 | MTKHNMIVP |
| 2200 | MTLPWGQQY |
| 2201 | MTLTNMAYL |
| 2202 | MTMDENTCR |
| 2203 | MTMPVMINQ |
| 2204 | MTMTATTFG |
| 2205 | MTQRVVHWG |
| 2206 | MTQYLQDSV |
| 2207 | MTQYNKKVN |
| 2208 | MTRCEGLFT |
| 2209 | MTSHVQHRF |
| 2210 | MTVLICDYE |
| 2211 | MVALVDGHR |
| 2212 | MVAVYNRQR |
| 2213 | MVCPSNCAN |
| 2214 | MVCTSLRFK |
| 2215 | MVDFGNMQP |
| 2216 | MVEYCYTQE |
| 2217 | MVILSVETE |
| 2218 | MVKQGGDWR |
| 2219 | MVLKICTAK |
| 2220 | MVMPVNIVD |
| 2221 | MVMQDNASM |
| 2222 | MVMSKQADL |
| 2223 | MVNHHYMTG |
| 2224 | MVQMDVHWE |
| 2225 | MVSLITSRT |
| 2226 | MVTEAHDYY |
| 2227 | MVVQSPIVE |
| 2228 | MWDVAHQSC |
| 2229 | MWISRDQDH |
| 2230 | MWNPMYIWN |
| 2231 | MWREFTMQQ |
| 2232 | MWTEFNEYV |
| 2233 | MWWRESAMR |
| 2234 | MYADFQSSY |
| 2235 | MYCMKPNRQ |
| 2236 | MYDSTHAVQ |
| 2237 | MYDSVHAVQ |
| 2238 | MYGQQSLWN |
| 2239 | MYHEANSGF |
| 2240 | MYHSKMTEA |
| 2241 | MYHSYQNSD |
| 2242 | MYKLLNDFS |
| 2243 | MYKQMGMAD |
| 2244 | MYLRDHNGL |
| 2245 | MYRERRAGY |
| 2246 | MYVSYMTHC |
| 2247 | MYYHCITAQ |
| 2248 | NAAMQDINH |
| 2249 | NACFFQNDP |
| 2250 | NACMIERAK |
| 2251 | NACMIEWAK |
| 2252 | NACNAYGRG |
| 2253 | NACQNDLYW |
| 2254 | NADHRFDAV |
| 2255 | NADKIGMLD |
| 2256 | NADMLMNGS |
| 2257 | NADPQQYQE |
| 2258 | NAEANWEYQ |
| 2259 | NAELQQADI |
| 2260 | NAENYQRLY |
| 2261 | NAERYQKLY |
| 2262 | NAESEDMLE |
| 2263 | NAESRFAQM |
| 2264 | NAFSEYVYD |
| 2265 | NAGSHAIQS |
| 2266 | NALPCAFNE |
| 2267 | NAMLFHHAM |
| 2268 | NAMYSHFLY |
| 2269 | NANSHAIHS |
| 2270 | NANWLHTQI |
| 2271 | NAPPCAFNE |
| 2272 | NASLERKWN |
| 2273 | NASQYQLSA |
| 2274 | NATDMGISF |
| 2275 | NATTIHMWF |
| 2276 | NAVFVQNLR |
| 2277 | NAVLQQYQE |
| 2278 | NAYSPESDG |
| 2279 | NCAERMKFC |
| 2280 | NCAEYFDHC |
| 2281 | NCAIQLDQQ |
| 2282 | NCEPIPFFP |
| 2283 | NCIINHGRD |
| 2284 | NCLEVVRAC |
| 2285 | NCLPMPSLH |
| 2286 | NCLQIGMQF |
| 2287 | NCNIKEAMD |
| 2288 | NCPREVATT |
| 2289 | NCQNTTHYA |
| 2290 | NCQPFMDYH |
| 2291 | NCQPIMDTH |
| 2292 | NCQRVNWTE |
| 2293 | NCTLFQDSH |
| 2294 | NCVQSFAVD |
| 2295 | NCVSRKKFA |
| 2296 | NDFMGAPEP |
| 2297 | NDVIYIYQG |
| 2298 | NEAHLWGHV |
| 2299 | NEAILFAYH |
| 2300 | NEAPYSTWQ |
| 2301 | NESNPQNGW |
| 2302 | NFAQFTKFQ |
| 2303 | NFCKQGNTC |
| 2304 | NFDQIGGCR |
| 2305 | NFDQMKCAQ |
| 2306 | NFEQINPLG |
| 2307 | NFLSSCSSA |
| 2308 | NFNQSSSTM |
| 2309 | NFRHTDQCG |
| 2310 | NFTFQCGIH |
| 2311 | NFVHIQSGE |
| 2312 | NFVTSGQMG |
| 2313 | NFYMIQSSN |
| 2314 | NFYMSGQAS |
| 2315 | NGEQWHKGG |
| 2316 | NGGSYIPCM |
| 2317 | NGILMHTTF |
| 2318 | NGPSYISWV |
| 2319 | NGQHFDMVG |
| 2320 | NGTGVVECG |
| 2321 | NHAPLLAFW |
| 2322 | NHASTGAGT |
| 2323 | NHCPVQKAT |
| 2324 | NHCSMCCGN |
| 2325 | NHDEKLWAP |
| 2326 | NHDYVKQTS |
| 2327 | NHDYYCQTS |
| 2328 | NHELYAQVA |
| 2329 | NHGQLKFPV |
| 2330 | NHGSREIDI |
| 2331 | NHILKMEFW |
| 2332 | NHNCVEMHG |
| 2333 | NHPYDIGQY |
| 2334 | NHRVNYEMY |
| 2335 | NHSWVEMFG |
| 2336 | NHVAYYMAK |
| 2337 | NHYPLMVEW |
| 2338 | NIAANWMFD |
| 2339 | NIAGYWMFD |
| 2340 | NICNLNQVE |
| 2341 | NICTWNEAC |
| 2342 | NICVKNKLH |
| 2343 | NIELKTYFF |
| 2344 | NIERKTYAF |
| 2345 | NIFDWQFYA |
| 2346 | NIHCKLHWY |
| 2347 | NIICFNWQV |
| 2348 | NIIHLMDYA |
| 2349 | NIIQLMDYA |
| 2350 | NINCIQIGK |
| 2351 | NINHYNEGE |
| 2352 | NIRCGNDAS |
| 2353 | NISEPSQDY |
| 2354 | NISFGTPPN |
| 2355 | NISFGTPSN |
| 2356 | NITQMYKHI |
| 2357 | NIVSQTHQE |
| 2358 | NIYHESHCG |
| 2359 | NKFNGMHCG |
| 2360 | NKFWSIDTS |
| 2361 | NKNTHAAVW |
| 2362 | NLFLTNGMG |
| 2363 | NLFLWLMMD |
| 2364 | NLHPRCHWI |
| 2365 | NLKCIMIQC |
| 2366 | NLVPFQTCE |
| 2367 | NMMDLLTHC |
| 2368 | NMMDLRTHC |
| 2369 | NMMPRVCWQ |
| 2370 | NMNTFGKMN |
| 2371 | NMTMAHQAS |
| 2372 | NMYHVQRFS |
| 2373 | NNAIMWASP |
| 2374 | NNGPGNIGM |
| 2375 | NNGVHIFCE |
| 2376 | NNLPLLTSV |
| 2377 | NPDTMSHTA |
| 2378 | NPEMDLRCA |
| 2379 | NPEMDLWCA |
| 2380 | NPIPGYFDQ |
| 2381 | NPIVMNCLS |
| 2382 | NPQPWLGMW |
| 2383 | NPTVLMAHL |
| 2384 | NQEEGHCLY |
| 2385 | NQGPQMHGF |
| 2386 | NQHVIYDVT |
| 2387 | NQKAMCWMY |
| 2388 | NQNFLGNWG |
| 2389 | NQVLLDDGM |
| 2390 | NRCDFSLFE |
| 2391 | NRCFTTIEP |
| 2392 | NRCFTTTEP |
| 2393 | NREFQMIHC |
| 2394 | NREMIYAAF |
| 2395 | NRLVVNGPH |
| 2396 | NRVAKIWRW |
| 2397 | NSAKKEQGV |
| 2398 | NSCTDNSSS |
| 2399 | NSEHEGMWD |
| 2400 | NSEQKQHLQ |
| 2401 | NSFAFDMTE |
| 2402 | NSGIPNNLA |
| 2403 | NSGYECHAL |
| 2404 | NSGYEWHAL |
| 2405 | NSIPYQFAV |
| 2406 | NSNSQARVY |
| 2407 | NSQWVQMFG |
| 2408 | NSTYATWAC |
| 2409 | NSYQIGGTR |
| 2410 | NTDHKMWDS |
| 2411 | NTEHSPATN |
| 2412 | NTGLENNIP |
| 2413 | NTGYYNQQC |
| 2414 | NTHHVTQWH |
| 2415 | NTHQMAVVY |
| 2416 | NTIHRESPA |
| 2417 | NTMLKEMGP |
| 2418 | NTMPLQPME |
| 2419 | NTMYWWPRE |
| 2420 | NTNFYQQMS |
| 2421 | NTQLHDNFG |
| 2422 | NTSHGCTYY |
| 2423 | NTSMLNNGS |
| 2424 | NTTIYQQQP |
| 2425 | NVDGQCTVA |
| 2426 | NVDGRHPMT |
| 2427 | NVDHRFDAV |
| 2428 | NVDQKCQAN |
| 2429 | NVGYCKWQS |
| 2430 | NVISLLNCR |
| 2431 | NVNAPKKQM |
| 2432 | NVQFHMMMS |
| 2433 | NVQQQCNFQ |
| 2434 | NVSFTEIGW |
| 2435 | NVSGYAAIQ |
| 2436 | NVSWYAAIQ |
| 2437 | NVTHISVGT |
| 2438 | NVVHHPVAP |
| 2439 | NVVHVENIG |
| 2440 | NVWTCNYQP |
| 2441 | NVYMRTCNM |
| 2442 | NWAGVQRIM |
| 2443 | NWEMAQHDR |
| 2444 | NWFLTHPIL |
| 2445 | NWLVQHAFQ |
| 2446 | NWTQTQAEA |
| 2447 | NWYSTNTCF |
| 2448 | NYDFLHHVE |
| 2449 | NYELYKQVA |
| 2450 | NYGPKMLTP |
| 2451 | NYMQTTNDD |
| 2452 | NYNHFFAAD |
| 2453 | NYQSEMINW |
| 2454 | NYQSFGLFA |
| 2455 | NYYANGNWP |
| 2456 | PACYSDVLN |
| 2457 | PADLCDTCQ |
| 2458 | PCFFRHNYW |
| 2459 | PCPTAINQH |
| 2460 | PDDDFGSCE |
| 2461 | PDDYFGTCE |
| 2462 | PDECGFGLT |
| 2463 | PDMVNDWWY |
| 2464 | PDNQFSRVV |
| 2465 | PDQYLVIGD |
| 2466 | PDSPGVCSC |
| 2467 | PEFYVKKFD |
| 2468 | PEFYVQKFD |
| 2469 | PFAEKAPDV |
| 2470 | PGHSDKSSN |
| 2471 | PGLLIPNGK |
| 2472 | PHATYNKPT |
| 2473 | PHPDSAVQL |
| 2474 | PIIKGEPAD |
| 2475 | PIIKRVSWT |
| 2476 | PILNVMCAE |
| 2477 | PKHSDKSHN |
| 2478 | PKMIKQPVS |
| 2479 | PKQYWQHWF |
| 2480 | PKRIRYRTK |
| 2481 | PKRYQAWTW |
| 2482 | PKSCFQCTA |
| 2483 | PKWWPIQYD |
| 2484 | PLCCTHWGT |
| 2485 | PLQNWFSAQ |
| 2486 | PLRAECQWA |
| 2487 | PLRPECPWA |
| 2488 | PMSVTNSAY |
| 2489 | PMVHGLVYS |
| 2490 | PPDMQSAKW |
| 2491 | PPFKAAKYS |
| 2492 | PPMISHCEP |
| 2493 | PPPLKAPMY |
| 2494 | PPPPPPPPP |
| 2495 | PQTLWDKSG |
| 2496 | PRHTMLGPS |
| 2497 | PRNPLQVQN |
| 2498 | PRPLKAPMY |
| 2499 | PSYTMHACP |
| 2500 | PTAAFMQFM |
| 2501 | PTDGINISG |
| 2502 | PTEFHINVQ |
| 2503 | PTEKTHGPL |
| 2504 | PTHNLCMRV |
| 2505 | PTQFYGPAF |
| 2506 | PTRLTVYRC |
| 2507 | PTYPYEWFQ |
| 2508 | PVEVGQNQC |
| 2509 | PVHFWTQAK |
| 2510 | PVTHPQTSK |
| 2511 | PWRTRVGAR |
| 2512 | PWTEMPNKI |
| 2513 | PWTEMSNKI |
| 2514 | PYCWLSTAF |
| 2515 | PYKTQEGDG |
| 2516 | PYKTQEWYG |
| 2517 | PYQPLSCPP |
| 2518 | QACNITNSG |
| 2519 | QADNARSVH |
| 2520 | QADTLQHWD |
| 2521 | QAEGHFTNC |
| 2522 | QAEHRLNAD |
| 2523 | QAGFIQNNQ |
| 2524 | QAGGSGFNE |
| 2525 | QAGSSFHQA |
| 2526 | QAHISPSMC |
| 2527 | QAHTNMQVH |
| 2528 | QAHWWHAHH |
| 2529 | QAIANNAMQ |
| 2530 | QAIHMPLFT |
| 2531 | QAILRQNLP |
| 2532 | QAIPRENPM |
| 2533 | QAIPYSFCE |
| 2534 | QAIQVGMCH |
| 2535 | QAITGDRSN |
| 2536 | QALMLTRQQ |
| 2537 | QAMHKADHS |
| 2538 | QAMPNNMCC |
| 2539 | QAMTNGIAC |
| 2540 | QANFGMTQL |
| 2541 | QANPCSFGN |
| 2542 | QANPRNRTA |
| 2543 | QANSNIHQP |
| 2544 | QANWTECID |
| 2545 | QAPDQSYMP |
| 2546 | QASWHSVDQ |
| 2547 | QATLEWAHE |
| 2548 | QATLRSSCS |
| 2549 | QATMIHHDD |
| 2550 | QATNEHIFW |
| 2551 | QATVCHFHA |
| 2552 | QATWEGIRD |
| 2553 | QATWQCRYF |
| 2554 | QAVCSSNAM |
| 2555 | QAVFEDADN |
| 2556 | QAWNFTIFH |
| 2557 | QAWSYDNER |
| 2558 | QAYAYLNSS |
| 2559 | QAYQYRSCK |
| 2560 | QCANGYQSQ |
| 2561 | QCAPCDICC |
| 2562 | QCDFMIIEY |
| 2563 | QCDFRRKDY |
| 2564 | QCEPIPFEP |
| 2565 | QCEQDAQQE |
| 2566 | QCGEIHRAY |
| 2567 | QCGQQMKMC |
| 2568 | QCHHGYIYE |
| 2569 | QCHQNYGLI |
| 2570 | QCITGNAGA |
| 2571 | QCLQTNPYN |
| 2572 | QCMFRIDWD |
| 2573 | QCMFRIDWY |
| 2574 | QCNWIHNTM |
| 2575 | QCQHDMHCE |
| 2576 | QCQYPSHFM |
| 2577 | QCSGYHWMK |
| 2578 | QCSWHGVDQ |
| 2579 | QCTQMVCCG |
| 2580 | QCVEPPQNC |
| 2581 | QCVEPPQNW |
| 2582 | QCVKFMQYN |
| 2583 | QCVMDGCMA |
| 2584 | QDDLIYQTG |
| 2585 | QDFYIMAMG |
| 2586 | QDMSAWPDG |
| 2587 | QDVVNIEAA |
| 2588 | QEIPAMQQQ |
| 2589 | QETMIGQSF |
| 2590 | QEVFELDNM |
| 2591 | QEVRQFCSS |
| 2592 | QFAFRGSHI |
| 2593 | QFAIQEGAI |
| 2594 | QFCTSCASN |
| 2595 | QFEGQSKHE |
| 2596 | QFEGWVHNE |
| 2597 | QFGLINEHV |
| 2598 | QFHQQVIWS |
| 2599 | QFILTPRDF |
| 2600 | QFKNNWQIE |
| 2601 | QFLDNQQAF |
| 2602 | QFLEAPMMH |
| 2603 | QFLSMMNCF |
| 2604 | QFMQHPQMQ |
| 2605 | QFNPLQDQC |
| 2606 | QFNYVMIGD |
| 2607 | QFQWSMEHK |
| 2608 | QFRYMGHQI |
| 2609 | QFSEFVRWN |
| 2610 | QFSHIQAAP |
| 2611 | QFSPCVKMF |
| 2612 | QFTIHERID |
| 2613 | QFTYFNCWS |
| 2614 | QFVNWQRLF |
| 2615 | QGAMKQTCK |
| 2616 | QGDFDQTVL |
| 2617 | QGDPDQTTL |
| 2618 | QGEFLIGQS |
| 2619 | QGESRFMFQ |
| 2620 | QGFVVHSPS |
| 2621 | QGGFNYAAS |
| 2622 | QGGYASFHS |
| 2623 | QGHKTMHVF |
| 2624 | QGQHVTLAW |
| 2625 | QGTHTHWLG |
| 2626 | QGTTDMPMY |
| 2627 | QGVSTRCHC |
| 2628 | QHCQGLFWS |
| 2629 | QHCQGLSWS |
| 2630 | QHDFTSCYW |
| 2631 | QHFNMVQGL |
| 2632 | QHIWAPMGM |
| 2633 | QHLHSEWGS |
| 2634 | QHLHSMWGY |
| 2635 | QHMHTTMQY |
| 2636 | QHMPSKRLD |
| 2637 | QHQTIDEQF |
| 2638 | QHRMGFSWM |
| 2639 | QHSTYWTGV |
| 2640 | QHVATQNLG |
| 2641 | QHVSVGDCV |
| 2642 | QHWFVKCCV |
| 2643 | QHYHTCMQY |
| 2644 | QIAHCQYNE |
| 2645 | QIANEDTYA |
| 2646 | QIDIQMAWP |
| 2647 | QIELFMDMD |
| 2648 | QIFGIQFAG |
| 2649 | QIIPGGFKH |
| 2650 | QIKLSPMDP |
| 2651 | QIMQHPQMQ |
| 2652 | QIQCTMISQ |
| 2653 | QIQDFFTLP |
| 2654 | QISNWGFGA |
| 2655 | QITDNLFEY |
| 2656 | QITDWYQFF |
| 2657 | QIVYHLLNG |
| 2658 | QIYSLASTW |
| 2659 | QKCPINQPR |
| 2660 | QKGMMLDCA |
| 2661 | QKGPHNMSE |
| 2662 | QKIPFDHDA |
| 2663 | QKIYSWGPI |
| 2664 | QKQQGTCGN |
| 2665 | QLDTMMYTN |
| 2666 | QLELFNSAY |
| 2667 | QLEPQVNSD |
| 2668 | QLFCWVTSK |
| 2669 | QLFVWVTAK |
| 2670 | QLGGVEFYT |
| 2671 | QLHCVQMQS |
| 2672 | QLKEVMLQY |
| 2673 | QLMVAFLCL |
| 2674 | QLNQWMFAG |
| 2675 | QLSQSSTAY |
| 2676 | QLTAFCWQE |
| 2677 | QLTAFGVQE |
| 2678 | QLVWNQKQQ |
| 2679 | QMAEFEAEA |
| 2680 | QMDHRHTFE |
| 2681 | QMDHRHTVC |
| 2682 | QMEDTFQNS |
| 2683 | QMEQFGIPG |
| 2684 | QMFCKNTDM |
| 2685 | QMFIFQANN |
| 2686 | QMFLWYGHN |
| 2687 | QMGYREERM |
| 2688 | QMHICMYEG |
| 2689 | QMHIVHCTG |
| 2690 | QMHTGATWG |
| 2691 | QMHTQATNG |
| 2692 | QMKPLINDE |
| 2693 | QMMPAYHTE |
| 2694 | QMMYRDTSE |
| 2695 | QMMYWSVIE |
| 2696 | QMNQFGVGL |
| 2697 | QMNQLFCSS |
| 2698 | QMRDIRAMG |
| 2699 | QMRIQTQDP |
| 2700 | QMVQYQWWN |
| 2701 | QMVRFNNSA |
| 2702 | QMVSGDMED |
| 2703 | QMVSYEAYR |
| 2704 | QNAIVTQFA |
| 2705 | QNAPYMENA |
| 2706 | QNCFTYEDQ |
| 2707 | QNENFNTGC |
| 2708 | QNGHTGVAI |
| 2709 | QNICNQQQD |
| 2710 | QNICNQQQY |
| 2711 | QNILAGDCI |
| 2712 | QNKHLNGLM |
| 2713 | QNMLAGDCM |
| 2714 | QNNTTRGFT |
| 2715 | QNQSADVDA |
| 2716 | QNTPQHNFM |
| 2717 | QNVCINQAM |
| 2718 | QNYYYPPMH |
| 2719 | QPAMENTTP |
| 2720 | QPKALELVP |
| 2721 | QPYQQSQMD |
| 2722 | QPYQQSQMG |
| 2723 | QQAMWLHSS |
| 2724 | QQCIPLTWE |
| 2725 | QQECKHKMQ |
| 2726 | QQEQLDFSD |
| 2727 | QQFTIQDHK |
| 2728 | QQLGPKFEK |
| 2729 | QQQQTNFQN |
| 2730 | QQRFCCPWD |
| 2731 | QQSFSVDVN |
| 2732 | QQSFYCANV |
| 2733 | QQSNLNLGK |
| 2734 | QQSVCQVQN |
| 2735 | QQTMMEAFD |
| 2736 | QQVIANLAG |
| 2737 | QRCTWDQAY |
| 2738 | QREEANSGC |
| 2739 | QRGHGMDSG |
| 2740 | QRTTALKDQ |
| 2741 | QRVEVSKCR |
| 2742 | QRYVQEACP |
| 2743 | QRYVQEACS |
| 2744 | QSADEAACS |
| 2745 | QSADFMFMG |
| 2746 | QSAEWYLND |
| 2747 | QSAIFNTSH |
| 2748 | QSASQVLFP |
| 2749 | QSAVWNGCE |
| 2750 | QSCWFSHNP |
| 2751 | QSDNARSVH |
| 2752 | QSFPCMFKD |
| 2753 | QSFPHQQAQ |
| 2754 | QSFPMQSMQ |
| 2755 | QSGAFEKHQ |
| 2756 | QSGCREIDW |
| 2757 | QSGCTLQFP |
| 2758 | QSGNAWGSL |
| 2759 | QSHDFANCA |
| 2760 | QSHHFLNSD |
| 2761 | QSHPSVSNM |
| 2762 | QSHSKHDSK |
| 2763 | QSHSWVSNM |
| 2764 | QSICNQWCQ |
| 2765 | QSLNFNQHC |
| 2766 | QSLPRYGFD |
| 2767 | QSMGKAMNT |
| 2768 | QSMQKMMDF |
| 2769 | QSMWSAFKH |
| 2770 | QSNHFGAGV |
| 2771 | QSNLTEAGQ |
| 2772 | QSNQVIDQF |
| 2773 | QSPYGRKQA |
| 2774 | QSQGVVDTS |
| 2775 | QSQGVVINS |
| 2776 | QSRCLFACI |
| 2777 | QSSSSYLWG |
| 2778 | QSTDDNICH |
| 2779 | QSTHRVGSY |
| 2780 | QSTNMDFCG |
| 2781 | QSTPILGPK |
| 2782 | QSTPTILPK |
| 2783 | QSTTYWNAM |
| 2784 | QSVHRNTRN |
| 2785 | QSVTDNYFY |
| 2786 | QSWNVGFTS |
| 2787 | QSWSQVAFP |
| 2788 | QSWSQVTFP |
| 2789 | QSYIMGSFH |
| 2790 | QTADIETNQ |
| 2791 | QTAEFKRHQ |
| 2792 | QTAQIELYH |
| 2793 | QTAQINCSM |
| 2794 | QTDKPVYSA |
| 2795 | QTEEYKAVE |
| 2796 | QTELARENT |
| 2797 | QTERKFSAL |
| 2798 | QTFSTMGTD |
| 2799 | QTGMQWTGG |
| 2800 | QTGSAQSAF |
| 2801 | QTGTFGINS |
| 2802 | QTILDVQSV |
| 2803 | QTKDWGFVH |
| 2804 | QTKVLFERD |
| 2805 | QTLSRDDWC |
| 2806 | QTLSRLDIC |
| 2807 | QTMTQQYPE |
| 2808 | QTNMVDRIF |
| 2809 | QTNPLGCMC |
| 2810 | QTNTREGWG |
| 2811 | QTQMGQYAS |
| 2812 | QTRLWNNYC |
| 2813 | QTSEEQSDW |
| 2814 | QTSLTDSIL |
| 2815 | QTSPKFCMC |
| 2816 | QTSYSYADP |
| 2817 | QTTDMFQSF |
| 2818 | QTTPYVWVF |
| 2819 | QTTQETAQC |
| 2820 | QTTVEKICH |
| 2821 | QTVEWTTQQ |
| 2822 | QTVIQWHDW |
| 2823 | QTVKNVYSA |
| 2824 | QTWFKGFAC |
| 2825 | QTYQYRSCK |
| 2826 | QVEGSNMHW |
| 2827 | QVESRCMFQ |
| 2828 | QVEVGEKYH |
| 2829 | QVEYGNHDM |
| 2830 | QVFCKHEYT |
| 2831 | QVHAINDGH |
| 2832 | QVHHNMQVH |
| 2833 | QVHLPVEQG |
| 2834 | QVIPAMMKQ |
| 2835 | QVMHTLRTY |
| 2836 | QVNQGFKAS |
| 2837 | QVQSGQFIF |
| 2838 | QVSCVIMTP |
| 2839 | QVSQQEGIV |
| 2840 | QVTFVHCEN |
| 2841 | QVTHKWFAM |
| 2842 | QVTNQNKTR |
| 2843 | QVTPNFSCD |
| 2844 | QVVDMQDWC |
| 2845 | QVVPRYYSD |
| 2846 | QWAKMFADN |
| 2847 | QWAPIMPLS |
| 2848 | QWARWSVQD |
| 2849 | QWCESNSHL |
| 2850 | QWDCCVQDR |
| 2851 | QWDKVDGMM |
| 2852 | QWDLVGAVG |
| 2853 | QWDNKNQFP |
| 2854 | QWDTAQDCQ |
| 2855 | QWDYARQNF |
| 2856 | QWEAFEFIL |
| 2857 | QWEAFGHID |
| 2858 | QWEIYGKMN |
| 2859 | QWEKQNAWG |
| 2860 | QWENQPAWG |
| 2861 | QWHPKHSFA |
| 2862 | QWKHLHWTI |
| 2863 | QWMLKDSLK |
| 2864 | QWMQNQRYM |
| 2865 | QWMSKISDL |
| 2866 | QWNKNQNAP |
| 2867 | QWNLVGKVG |
| 2868 | QWPEYTTEA |
| 2869 | QWPHYTTEC |
| 2870 | QWPPTHDMG |
| 2871 | QWQDDNSQF |
| 2872 | QWQLTGHLN |
| 2873 | QWQRFNHGV |
| 2874 | QWQSFLTED |
| 2875 | QWRIMTQDP |
| 2876 | QWSQARSQY |
| 2877 | QWSQMDRMQ |
| 2878 | QWVMKHSYH |
| 2879 | QYAITYQEG |
| 2880 | QYAMFEKMS |
| 2881 | QYAMSFTQM |
| 2882 | QYDPYIQGD |
| 2883 | QYDQASDML |
| 2884 | QYFLSMDTE |
| 2885 | QYFQSNNQC |
| 2886 | QYFQTSNSR |
| 2887 | QYGLYKDTQ |
| 2888 | QYRSLDSDH |
| 2889 | QYRTPDEAI |
| 2890 | QYRTQDEAL |
| 2891 | QYVGMYTQQ |
| 2892 | QYVHMLGEC |
| 2893 | RAAGNSIDV |
| 2894 | RACMEGWPK |
| 2895 | RADNRCGQD |
| 2896 | RADSNKQFE |
| 2897 | RAEHVLNAD |
| 2898 | RAEPINHYN |
| 2899 | RAGMCENFG |
| 2900 | RAGMEPNFG |
| 2901 | RAIDCHRLN |
| 2902 | RANAESDQP |
| 2903 | RATLGASLH |
| 2904 | RATQWDSYP |
| 2905 | RAVQLEYCQ |
| 2906 | RCDSNDGQM |
| 2907 | RCDSVEVQY |
| 2908 | RCFFKMEAV |
| 2909 | RCIGKEDMT |
| 2910 | RCVAEPNEP |
| 2911 | RCVDLSMAS |
| 2912 | RCYEQHMWP |
| 2913 | RDDELLEPG |
| 2914 | REAYLNYVA |
| 2915 | REEMFVYMP |
| 2916 | REFELSIGH |
| 2917 | REGKVFDCY |
| 2918 | REMCSTGHF |
| 2919 | REQMVFRDQ |
| 2920 | RFADSKLHD |
| 2921 | RFDFLQSWF |
| 2922 | RFDLMLKDL |
| 2923 | RFDLQMGGG |
| 2924 | RFDMQHCFY |
| 2925 | RFDMSHQGR |
| 2926 | RFDNTTQYG |
| 2927 | RFDQFLMHM |
| 2928 | RFDQYTFLE |
| 2929 | RFEEMDFDM |
| 2930 | RFELLMEDH |
| 2931 | RFELTQNSL |
| 2932 | RFEMSHEQW |
| 2933 | RFEPSMKHC |
| 2934 | RFEPYMKIC |
| 2935 | RFEVSMREA |
| 2936 | RFIQMEITQ |
| 2937 | RFKMQFVTS |
| 2938 | RFSVRDYAP |
| 2939 | RFVPNCMSI |
| 2940 | RFYFTAEMN |
| 2941 | RGDKIHACF |
| 2942 | RGGLQFVEA |
| 2943 | RGHETYGPI |
| 2944 | RGKPTWTEK |
| 2945 | RGLQRVRTC |
| 2946 | RHDEQPFCK |
| 2947 | RHGFKDSGE |
| 2948 | RHGNFEAMA |
| 2949 | RIDDWAHGR |
| 2950 | RIDHAHFQW |
| 2951 | RIETPCHGS |
| 2952 | RIQQQEDLG |
| 2953 | RKKVEVVVE |
| 2954 | RKMWQSHCE |
| 2955 | RLNYRHYSK |
| 2956 | RMAEPVENE |
| 2957 | RMDTSSRAE |
| 2958 | RMDTSVRCE |
| 2959 | RMEGCWGCA |
| 2960 | RMKWYLPCV |
| 2961 | RMMWQSHCD |
| 2962 | RNAKEVPLP |
| 2963 | RNDVWEHVF |
| 2964 | RNLNLQTTI |
| 2965 | RNWLPENYT |
| 2966 | RPEAHPHYA |
| 2967 | RPEANKHYA |
| 2968 | RQDIFPHQD |
| 2969 | RRDCIIPMM |
| 2970 | RSAWMDYTC |
| 2971 | RSDFIAHMH |
| 2972 | RSEHFEHIG |
| 2973 | RSFMCGLIG |
| 2974 | RSGQGEGHM |
| 2975 | RSMLVERNT |
| 2976 | RSTPEAQQY |
| 2977 | RSWTACEID |
| 2978 | RTESWSSLA |
| 2979 | RTEWMKGVD |
| 2980 | RTEYKEGYF |
| 2981 | RTFMNDMCE |
| 2982 | RTFYVMGTE |
| 2983 | RTKYCSAFG |
| 2984 | RTSVEMCTM |
| 2985 | RVDAFNRGT |
| 2986 | RVDIGMGWK |
| 2987 | RVDPFPIAH |
| 2988 | RVDQRHLPT |
| 2989 | RVDVFSYCG |
| 2990 | RVGFMEGGM |
| 2991 | RVLDNPAEY |
| 2992 | RVMEYAAEW |
| 2993 | RVQMSCYTE |
| 2994 | RVQSGHQRG |
| 2995 | RVTMTSETC |
| 2996 | RVVQRYLPT |
| 2997 | RVWECVCSQ |
| 2998 | RWAEMHVQC |
| 2999 | RWDFVWYIQ |
| 3000 | RWDVDHQSC |
| 3001 | RWDVEQMVG |
| 3002 | RWDVMLEDR |
| 3003 | RWEAYGSQN |
| 3004 | RWEIRQMDM |
| 3005 | RWEPVQIFK |
| 3006 | RWHQGPCHP |
| 3007 | RWNTVFKID |
| 3008 | RYDEQPFCK |
| 3009 | RYDSQHQFK |
| 3010 | RYESFTKHP |
| 3011 | RYPCTIVEQ |
| 3012 | RYQPDPMLM |
| 3013 | RYTEMSCDD |
| 3014 | SAAAWWANG |
| 3015 | SAAEKAMDQ |
| 3016 | SADFLFKSF |
| 3017 | SADRLDLVL |
| 3018 | SAHHSHCNP |
| 3019 | SAINMHYIE |
| 3020 | SAKDPLQAN |
| 3021 | SALAHILSL |
| 3022 | SAMCSGSLL |
| 3023 | SAMDSLGVH |
| 3024 | SAMSVMDNM |
| 3025 | SAMTAIRMS |
| 3026 | SAMWFTANG |
| 3027 | SANNDAFLC |
| 3028 | SASHGGLAY |
| 3029 | SATCIPHSR |
| 3030 | SATDMDGAF |
| 3031 | SATFCGINV |
| 3032 | SATLHPLSL |
| 3033 | SATPHLYCH |
| 3034 | SATPHWYCH |
| 3035 | SAVASILNH |
| 3036 | SAVGGCWGA |
| 3037 | SAVGSHSSS |
| 3038 | SAWQSSVCM |
| 3039 | SCCFQIADR |
| 3040 | SCEQDGMDR |
| 3041 | SCFCMQHPI |
| 3042 | SCFLDHASG |
| 3043 | SCFRFTQAW |
| 3044 | SCGCMHEDF |
| 3045 | SCGCSLYQV |
| 3046 | SCGHSLGCF |
| 3047 | SCHTDGQWP |
| 3048 | SCKAHAAAP |
| 3049 | SCLAMDHVY |
| 3050 | SCLQMFSWH |
| 3051 | SCNFEFLWM |
| 3052 | SCNIGQYWP |
| 3053 | SCQHAIANQ |
| 3054 | SCQHPHDWE |
| 3055 | SCQLAIGHE |
| 3056 | SCQPVNEHE |
| 3057 | SCVQNMINC |
| 3058 | SCYSPIADR |
| 3059 | SDGMVHNCW |
| 3060 | SDLFKMFIE |
| 3061 | SDQPMHCWR |
| 3062 | SDQPMSCWG |
| 3063 | SDQPTMCNV |
| 3064 | SELYKCPYF |
| 3065 | SETICEWAP |
| 3066 | SFCKMCSFG |
| 3067 | SFCLFENIT |
| 3068 | SFDRGMWTV |
| 3069 | SFDRMMWTQ |
| 3070 | SFDTCNYFV |
| 3071 | SFEKYAGSD |
| 3072 | SFFYGTGSE |
| 3073 | SFGPLQNCG |
| 3074 | SFGTGCKCL |
| 3075 | SFHPLMHIA |
| 3076 | SFHPTPNDA |
| 307 | SFIGTNRDY |
| 3078 | SFIHMSHND |
| 3079 | SFLLCHQET |
| 3080 | SFLPIGIQE |
| 3081 | SFNTNQASV |
| 3082 | SFQSTEKCG |
| 3083 | SFSFYKCMQ |
| 3084 | SFSGIGPQH |
| 3085 | SFSKSFAAR |
| 3086 | SFSVFNCSH |
| 3087 | SFSVVQEQS |
| 3088 | SFSWIQSGD |
| 3089 | SFSYCDEPV |
| 3090 | SFWQIDDFN |
| 3091 | SGAGNNYHQ |
| 3092 | SGDSKHCHL |
| 3093 | SGEPMASCQ |
| 3094 | SGEPMTSCQ |
| 3095 | SGERWFVYP |
| 3096 | SGHMYQEGL |
| 3097 | SGISDHCHL |
| 3098 | SGPMSDMIS |
| 3099 | SGTGYVHGG |
| 3100 | SHASISHML |
| 3101 | SHASISHVL |
| 3102 | SHAVKHEQA |
| 3103 | SHDTWCVCT |
| 3104 | SHGFIDLQL |
| 3105 | SHLDFPVGR |
| 3106 | SHLWPNLHE |
| 3107 | SHMMQVAQF |
| 3108 | SHNNNPSGE |
| 3109 | SHQQYPAFW |
| 3110 | SHSCDGCGQ |
| 3111 | SHSSCCMTF |
| 3112 | SHTFINRHT |
| 3113 | SHTGVFKHY |
| 3114 | SHTQMELHN |
| 3115 | SIDSFMPIY |
| 3116 | SIEHWCCCQ |
| 3117 | SIFQIGQSP |
| 3118 | SIGQAWQSP |
| 3119 | SIHNAKEYR |
| 3120 | SIHPKQSRY |
| 3121 | SIIFLVSSG |
| 3122 | SIKYEDHGQ |
| 3123 | SILFNPNGR |
| 3124 | SIMPMNCGS |
| 3125 | SIMWRSDWT |
| 3126 | SINNALTIN |
| 3127 | SIQHCRDYY |
| 3128 | SIQLTNQCE |
| 3129 | SIQPCRDYC |
| 3130 | SISHMQARA |
| 3131 | SISSIEGYP |
| 3132 | SIYQLSWHG |
| 3133 | SKNTVGIGH |
| 3134 | SLADQVHVA |
| 3135 | SLDSIFACG |
| 3136 | SLGMDGMGV |
| 3137 | SLGNKLHIT |
| 3138 | SLRSYVDSF |
| 3139 | SLSEMRWAA |
| 3140 | SLSQYFESF |
| 3141 | SLTSSFAVL |
| 3142 | SLYNRYIHF |
| 3143 | SMAICMHDN |
| 3144 | SMDVTHFFE |
| 3145 | SMEPYIFGS |
| 3146 | SMFTHQLAQ |
| 3147 | SMFYVRLVC |
| 3148 | SMGYSEVFG |
| 3149 | SMHCSGYAL |
| 3150 | SMHHWAKGP |
| 3151 | SMHYYDTFE |
| 3152 | SMLQTTEQC |
| 3153 | SMLQTTSQM |
| 3154 | SMMCRCWLM |
| 3155 | SMNPNLTGD |
| 3156 | SMSFYQACH |
| 3157 | SMTNVPNLA |
| 3158 | SMWVPPNAA |
| 3159 | SMYMRVCYT |
| 3160 | SMYTMCTNH |
| 3161 | SMYTTEDIQ |
| 3162 | SNAMMFFCS |
| 3163 | SNDRVKKMD |
| 3164 | SNEANISVE |
| 3165 | SNMHYMRGS |
| 3166 | SNMPLMNMA |
| 3167 | SNSFYQTLG |
| 3168 | SNSHPFQSH |
| 3169 | SNSLYKKER |
| 3170 | SNWAIVKCD |
| 3171 | SNWQIVKTD |
| 3172 | SPISVNNTL |
| 3173 | SPLPMYNQE |
| 3174 | SPMFYGSAH |
| 3175 | SPNMFCEMQ |
| 3176 | SPYQYQLAE |
| 3177 | SQCVMQFPL |
| 3178 | SQGAGHCGN |
| 3179 | SQGPKHCGD |
| 3180 | SQIDLCVDM |
| 3181 | SQILEDLMG |
| 3182 | SQKQFSMQH |
| 3183 | SQKTICGSY |
| 3184 | SQMNCYGGC |
| 3185 | SQNMSVTQY |
| 3186 | SQNYHSMYA |
| 3187 | SQQHCQHDQ |
| 3188 | SQSFYFNHD |
| 3189 | SQTYVDMYA |
| 3190 | SRCMSSMCY |
| 3191 | SREYFATTF |
| 3192 | SREYFETTF |
| 3193 | SRGYRESDS |
| 3194 | SRKFCEGTP |
| 3195 | SRSPMMDMQ |
| 3196 | SSAAIYADF |
| 3197 | SSACYYAKG |
| 3198 | SSASSSEIC |
| 3199 | SSDCNRRCH |
| 3200 | SSEWLESAE |
| 3201 | SSFPEQQCH |
| 3202 | SSFYVQQCP |
| 3203 | SSGDSYQDY |
| 3204 | SSGHYNQLI |
| 3205 | SSGIMCADN |
| 3206 | SSGITAQCT |
| 3207 | SSHEICHDG |
| 3208 | SSHQNIGQP |
| 3209 | SSILMQMNC |
| 3210 | SSIQMQMQC |
| 3211 | SSISFQALG |
| 3212 | SSLYKFNHH |
| 3213 | SSMQQQLTW |
| 3214 | SSQHVNGVW |
| 3215 | SSQRITCEW |
| 3216 | SSQWSSGMY |
| 3217 | SSQYNTCEW |
| 3218 | SSTGEIQYG |
| 3219 | SSTGFDCEQ |
| 3220 | SSTGYPRGG |
| 3221 | SSTRDVCFC |
| 3222 | SSTSSSEIC |
| 3223 | SSVEFPWQT |
| 3224 | SSVPSMQCG |
| 3225 | SSYPESGWQ |
| 3226 | STAACTTWC |
| 3227 | STAHIIPDN |
| 3228 | STCHQWDAG |
| 3229 | STDDRMDAA |
| 3230 | STEQCGEWY |
| 3231 | STEVRWTGA |
| 3232 | STGWSAIAN |
| 3233 | STHQPCAQN |
| 3234 | STLQNIQTH |
| 3235 | STLTPVKLE |
| 3236 | STMQVIDIS |
| 3237 | STNEVWASM |
| 3238 | STNHVDDPL |
| 3239 | STQNNDMYC |
| 3240 | STRLIEQFG |
| 3241 | STRVMEQFG |
| 3242 | STSPYHRQN |
| 3243 | STTHRDNYE |
| 3244 | STTPQMHVS |
| 3245 | STTRFNFWN |
| 3246 | STWMSWEAI |
| 3247 | SVADQVQVA |
| 3248 | SVAQRPEMI |
| 3249 | SVAQRSEMF |
| 3250 | SVCQTTQHQ |
| 3251 | SVDLGTMEQ |
| 3252 | SVEQMRKIP |
| 3253 | SVHMLDDFM |
| 3254 | SVIPKHKNS |
| 3255 | SVIQTEHFD |
| 3256 | SVLCLSMGG |
| 3257 | SVNTMWYPD |
| 3258 | SVRMFDAQY |
| 3259 | SVRVQTWIG |
| 3260 | SVSPCFCNS |
| 3261 | SVSYESTIF |
| 3262 | SVTHDLHSF |
| 3263 | SVVFSAAEV |
| 3264 | SVVVVQTGK |
| 3265 | SVYMMTEGW |
| 3266 | SWAMISTCS |
| 3267 | SWDHLFTDQ |
| 3268 | SWISKGHCE |
| 3269 | SWLFSQDLK |
| 3270 | SWMWITNPN |
| 3271 | SWQSFILCE |
| 3272 | SWSERCSFE |
| 3273 | SWVKQDTMA |
| 3274 | SWVMLLPIH |
| 3275 | SYCHIMGVQ |
| 3276 | SYDAEQRNG |
| 3277 | SYESFRSMH |
| 3278 | SYGVIMTEE |
| 3279 | SYNPWNQHA |
| 3280 | SYQFAQYWL |
| 3281 | SYQRWDSCD |
| 3282 | SYSPCFCRS |
| 3283 | TAAFAYKYE |
| 3284 | TAALFEGSK |
| 3285 | TAAQKFMAN |
| 3286 | TAAYGDRYD |
| 3287 | TACDFISLT |
| 3288 | TADEFSCCQ |
| 3289 | TADTRVNHY |
| 3290 | TAEAFQKFI |
| 3291 | TAENIQTHN |
| 3292 | TAEVRWPCP |
| 3293 | TAFECMICG |
| 3294 | TAFECMIDG |
| 3295 | TAFNAQCGQ |
| 3296 | TAGGSDAEK |
| 3297 | TAGRFNYFD |
| 3298 | TAHLETDQN |
| 3299 | TAHLHMGNI |
| 3300 | TAIPMNELV |
| 3301 | TAITGFNIH |
| 3302 | TAKAQNAFE |
| 3303 | TAMASMWLS |
| 3304 | TAMHSAYHS |
| 3305 | TANKCDCSD |
| 3306 | TANVYRSGQ |
| 3307 | TASHCSFNQ |
| 3308 | TASMLMMTP |
| 3309 | TASNGCINS |
| 3310 | TASPMVEHW |
| 3311 | TATFSDFGF |
| 3312 | TATLSMWLS |
| 3313 | TAVEKNTLW |
| 3314 | TAVKLEQGS |
| 3315 | TAVNYWNTS |
| 3316 | TAYAFDCNC |
| 3317 | TCAPSSSMD |
| 3318 | TCCMWTFIW |
| 3319 | TCCSFSFYS |
| 3320 | TCCTVERES |
| 3321 | TCDHASDIE |
| 3322 | TCDYNVDTT |
| 3323 | TCEAAQAQH |
| 3324 | TCGKAMEQY |
| 3325 | TCGLWKNLV |
| 3326 | TCGTTVRCG |
| 3327 | TCIHVAGVP |
| 3328 | TCISNHHTC |
| 3329 | TCLPNPMQL |
| 3330 | TCQQMGDIG |
| 3331 | TCQYEMVCD |
| 3332 | TCQYVMLCD |
| 3333 | TCTSGGSWL |
| 3334 | TCVEFMQWN |
| 3335 | TCVFTDHQC |
| 3336 | TCYFFGEQE |
| 3337 | TDAGMFAHD |
| 3338 | TDDPIHNFE |
| 3339 | TDEQCKFGH |
| 3340 | TEGPMHRAW |
| 3341 | TELSYDAFL |
| 3342 | TEQFCGIML |
| 3343 | TESMVMYER |
| 3344 | TFCCMDMIN |
| 3345 | TFDLMQAIR |
| 3346 | TFDPFTTSQ |
| 3347 | TFEPCQSGV |
| 3348 | TFHQSIVGE |
| 3349 | TFISLQQSS |
| 3350 | TFLMLVDDQ |
| 3351 | TFNIAYVQS |
| 3352 | TFSQEGVSI |
| 3353 | TFVIVDDQN |
| 3354 | TFWSSSNYE |
| 3355 | TGGMYYVQN |
| 3356 | TGKWLVYQA |
| 3357 | TGLFIRTMK |
| 3358 | TGLLIPNGK |
| 3359 | TGNDHHEVI |
| 3360 | TGNYVHSNQ |
| 3361 | TGRIKDAGP |
| 3362 | THAQIGTFD |
| 3363 | THAVTGILY |
| 3364 | THECYQMWH |
| 3365 | THEMVNENG |
| 3366 | THGYMQSHN |
| 3367 | THMNVVRSF |
| 3368 | THNTVPVER |
| 3369 | THQNTWLFY |
| 3370 | THRHSDMGF |
| 3371 | THTQYWAMQ |
| 3372 | TIAVIGSAA |
| 3373 | TICKTEIGH |
| 3374 | TICNCMFGA |
| 3375 | TICQTEFGH |
| 3376 | TIDGMMGDH |
| 3377 | TIEAKWECM |
| 3378 | TIEANWEYQ |
| 3379 | TIECEQRET |
| 3380 | TIEPGCQCT |
| 3381 | TIEWKLHMG |
| 3382 | TIFYYGGNI |
| 3383 | TIGEMVNPS |
| 3384 | TIHQSQFIC |
| 3385 | TIHSSVSAS |
| 3386 | TILCDQQQA |
| 3387 | TIMNWNDAK |
| 3388 | TIMSDGHTH |
| 3389 | TINLTTQSV |
| 3390 | TIRLTEQSV |
| 3391 | TISELQSEF |
| 3392 | TISIFTNCR |
| 3393 | TISLEYCTF |
| 3394 | TISWLGGCH |
| 3395 | TIVNMQMGN |
| 3396 | TIVWMCVNW |
| 3397 | TKEPCTVGV |
| 3398 | TKEPTTVGF |
| 3399 | TKFHMMIQT |
| 3400 | TKNCVASTF |
| 3401 | TKQFELKDE |
| 3402 | TKQFETKSE |
| 3403 | TKQHYDSPA |
| 3404 | TLCGLDSEY |
| 3405 | TLCGNTQCP |
| 3406 | TLEGSDSEY |
| 3407 | TLNNLHRVA |
| 3408 | TLPLFWRLK |
| 3409 | TLQMVMNKG |
| 3410 | TLRDSECYS |
| 3411 | TLTYYEEGE |
| 3412 | TLVPCQTCE |
| 3413 | TLVRGMHQI |
| 3414 | TLVRSDYDP |
| 3415 | TLVRSDYYP |
| 3416 | TLYMHEKLG |
| 3417 | TMANLCWRT |
| 3418 | TMCPHGIRC |
| 3419 | TMCPKMWQH |
| 3420 | TMDQGHCMI |
| 3421 | TMIHHQNAD |
| 3422 | TMLHSQNME |
| 3423 | TMMCDQQQA |
| 3424 | TMPPFPCHM |
| 3425 | TMPYSQWAM |
| 3426 | TMSDRQQDT |
| 3427 | TMSGYCCSF |
| 3428 | TMSVHYGQG |
| 3429 | TMTSTLQST |
| 3430 | TMVAGKMRC |
| 3431 | TMWEDNQNM |
| 3432 | TMYFNANTQ |
| 3433 | TMYTKTSMF |
| 3434 | TNEGVLHHT |
| 3435 | TNHELAEKP |
| 3436 | TNHELAMYP |
| 3437 | TNHPKCKKD |
| 3438 | TNIQKAMGA |
| 3439 | TNKTLPATF |
| 3440 | TNLVYQFLE |
| 3441 | TNQSQNCMF |
| 3442 | TPAMEISMF |
| 3443 | TPCISHCEP |
| 3444 | TPEEFTMSP |
| 3445 | TPGTLQGHH |
| 3446 | TPLMMCQAS |
| 3447 | TPNSFNCAS |
| 3448 | TPTLESNCR |
| 3449 | TQAECITVP |
| 3450 | TQCHDMWGH |
| 3451 | TQDFCSVCD |
| 3452 | TQECYYDQF |
| 3453 | TQEPIHHQN |
| 3454 | TQFPVEYMS |
| 3455 | TQGFYNVGV |
| 3456 | TQQNCMTGN |
| 3457 | TQSGYHFWC |
| 3458 | TQTILNCGY |
| 3459 | TQVLMEMCT |
| 3460 | TQWTEKRQA |
| 3461 | TRCFIDQGI |
| 3462 | TRIEQEWNH |
| 3463 | TSDASVQQS |
| 3464 | TSDMTMENQ |
| 3465 | TSDWWCQKC |
| 3466 | TSEGGIIYN |
| 3467 | TSFGISWLH |
| 3468 | TSFNMICNS |
| 3469 | TSGQPGISW |
| 3470 | TSHINIWGQ |
| 3471 | TSHWSAVQM |
| 3472 | TSHYITFTP |
| 3473 | TSLGQWTHF |
| 3474 | TSLHSSMGH |
| 3475 | TSLHYQFFA |
| 3476 | TSMSFDSTH |
| 3477 | TSNFEPFSP |
| 3478 | TSQCAHQWS |
| 3479 | TSQRNIEAG |
| 3480 | TSQRNIEVA |
| 3481 | TSQWLMNMQ |
| 3482 | TSSFMDCVD |
| 3483 | TSTIEELAQ |
| 3484 | TSTMAGPCI |
| 3485 | TSTQRQDVF |
| 3486 | TSTRLYPVD |
| 3487 | TSVMCNQTR |
| 3488 | TSVTIQFWE |
| 3489 | TSVWWCKKE |
| 3490 | TSVWWCQKE |
| 3491 | TSWIQTWGS |
| 3492 | TTAIRDLTM |
| 3493 | TTEKYWEHR |
| 3494 | TTFIIPIPS |
| 3495 | TTFRNINPA |
| 3496 | TTGPNPNCY |
| 3497 | TTGWRYQTS |
| 3498 | TTHQLAVVY |
| 3499 | TTKTCAEGG |
| 3500 | TTLAHILSL |
| 3501 | TTNGYMSMD |
| 3502 | TTNLPQPEM |
| 3503 | TTNQWMNYY |
| 3504 | TTQFCGSML |
| 3505 | TTSTSIIYH |
| 3506 | TTTGINYHH |
| 3507 | TTTIYQQQP |
| 3508 | TTVDNGFHS |
| 3509 | TTYQSGWHG |
| 3510 | TTYYCPTSQ |
| 3511 | TVAPHWIDH |
| 3512 | TVAPSNCAN |
| 3513 | TVDMLHMAS |
| 3514 | TVDQFDKYN |
| 3515 | TVDQYCVRA |
| 3516 | TVDSEVNAD |
| 3517 | TVENMPTYP |
| 3518 | TVENNYGGY |
| 3519 | TVKMIHVDW |
| 3520 | TVMHDHCDN |
| 3521 | TVMLESNCR |
| 3522 | TVNAESKGC |
| 3523 | TVNHWQQIC |
| 3524 | TVNLCDIYK |
| 3525 | TVNQSVADM |
| 3526 | TVQQDGAQM |
| 3527 | TVQQDGHQM |
| 3528 | TVTHMSQHC |
| 3529 | TVYKNEQVA |
| 3530 | TWAPSMYWM |
| 3531 | TWCQIQGMG |
| 3532 | TWDSCQDFY |
| 3533 | TWDSYIQRD |
| 3534 | TWEHCQYFE |
| 3535 | TWHETDDFI |
| 3536 | TWIEQEWNH |
| 3537 | TWIQEGHYG |
| 3538 | TWIQHMGTF |
| 3539 | TWISSQHCH |
| 3540 | TWMHMMSYR |
| 3541 | TWNCAGLLP |
| 3542 | TWNMIGQLP |
| 3543 | TWQFYQHGC |
| 3544 | TWSFMGCVD |
| 3545 | TWSHCSYFE |
| 3546 | TWSNYQWYQ |
| 3547 | TWTEQEWNH |
| 3548 | TWVTTMAMQ |
| 3549 | TWYQIEGAA |
| 3550 | TWYQKTGAA |
| 3551 | TWYTKRTEG |
| 3552 | TYDNEMSET |
| 3553 | TYDQMQTEF |
| 3554 | TYEQSQVLR |
| 3555 | TYEWYMGDW |
| 3556 | TYFLLHASG |
| 3557 | TYGKAMEQY |
| 3558 | TYGQWMEKA |
| 3559 | TYISNQQSS |
| 3560 | TYKTHTIGG |
| 3561 | TYLFSNQSR |
| 3562 | TYLYRKTVY |
| 3563 | TYPLAWLKQ |
| 3564 | TYSPMSGIE |
| 3565 | TYSPMSGIV |
| 3566 | TYSPMSGKA |
| 3567 | TYSPMSGKD |
| 3568 | TYSQMQTFF |
| 3569 | TYSSKYQGD |
| 3570 | TYSSWYQGE |
| 3571 | TYVKFLVHP |
| 3572 | TYVYNHKAF |
| 3573 | VAANTYCYG |
| 3574 | VADSSWNQP |
| 3575 | VADYTACPM |
| 3576 | VAGNATPSL |
| 3577 | VAGPMWVQT |
| 3578 | VAHCHVATE |
| 3579 | VAHPDMKYI |
| 3580 | VAILGLNPT |
| 3581 | VAIPVDYHT |
| 3582 | VAIYKTECI |
| 3583 | VAIYPGIIE |
| 3584 | VALIIDEWT |
| 3585 | VALSRNSIG |
| 3586 | VANLDYDPS |
| 3587 | VANPINRTA |
| 3588 | VANQNYAIC |
| 3589 | VAQSIQEVA |
| 3590 | VARPTMEEM |
| 3591 | VATALMMSL |
| 3592 | VATHIQVMH |
| 3593 | VAVVAEHCA |
| 3594 | VAYAFQCNC |
| 3595 | VAYLIQDAL |
| 3596 | VCEQWNEHL |
| 3597 | VCETIPIKE |
| 3598 | VCMLHVNCE |
| 3599 | VCMLHVNFE |
| 3600 | VCQRILELR |
| 3601 | VCRQMNDER |
| 3602 | VCTLIQDAH |
| 3603 | VCTPIIDCS |
| 3604 | VCVPIIHET |
| 3605 | VCYNADVPG |
| 3606 | VDAWDNTAC |
| 3607 | VDTHMNQKQ |
| 3608 | VDTLNQDAH |
| 3609 | VDTVWMLPG |
| 3610 | VEMQANKGL |
| 3611 | VESPVLTMG |
| 3612 | VESPVYNMG |
| 3613 | VFEGGFPYI |
| 3614 | VFFSVYQDK |
| 3615 | VFGIMPCGF |
| 3616 | VFGIMPCWQ |
| 3617 | VFHSMYNSM |
| 3618 | VFNKAIEWK |
| 3619 | VFNLAQNWH |
| 3620 | VFNPYIDVG |
| 3621 | VFNTFDESM |
| 3622 | VFNTFDQQM |
| 3623 | VFRSASNKH |
| 3624 | VFRSVDVVD |
| 3625 | VFRVKCAAD |
| 3626 | VFWMQLRDH |
| 3627 | VFYLSSQSC |
| 3628 | VGDHKNCMN |
| 3629 | VGEKTHGPL |
| 3630 | VGEPHFHSD |
| 3631 | VGGYSNQWV |
| 3632 | VGHWKVQSC |
| 3633 | VGHWKVQSY |
| 3634 | VGIMRNDTG |
| 3635 | VGIQTQSCF |
| 3636 | VGKGIEKVQ |
| 3637 | VGLALNCES |
| 3638 | VGNPYHHGR |
| 3639 | VGQGIEKVQ |
| 3640 | VGQHIWAQD |
| 3641 | VGQREVPSD |
| 3642 | VGRWHYCTE |
| 3643 | VGTSFACSN |
| 3644 | VGVQCSNGG |
| 3645 | VHAPNNLVA |
| 3646 | VHDKWNAHT |
| 3647 | VHDMCQWSD |
| 3648 | VHELFMDMD |
| 3649 | VHKCADYMC |
| 3650 | VHQPTQMHH |
| 3651 | VHQPTQSHH |
| 3652 | VHSFSEVTM |
| 3653 | VHTTYCQRE |
| 3654 | VHYRLCEHW |
| 3655 | VIDRLMACS |
| 3656 | VIEFFKAQC |
| 3657 | VIFSMYTCF |
| 3658 | VIGLCMGIV |
| 3659 | VIGLCTGIV |
| 3660 | VIIEEQDNS |
| 3661 | VIKHALAEI |
| 3662 | VIMYWHHCS |
| 3663 | VIQSYQAVF |
| 3664 | VKESDNWQQ |
| 3665 | VKFAWQKIN |
| 3666 | VKMEYQGGR |
| 3667 | VKQLRQDGF |
| 3668 | VLAMRVRHK |
| 3669 | VLSNWEVAA |
| 3670 | VMAPYMWDP |
| 3671 | VMDCVNAYW |
| 3672 | VMDFYMSGP |
| 3673 | VMDQYKLKV |
| 3674 | VMEFYKAQC |
| 3675 | VMEFYMSPP |
| 3676 | VMEHWGSQY |
| 3677 | VMEWWGSLY |
| 3678 | VMGNSMCLF |
| 3679 | VMGPCMNYD |
| 3680 | VMHINEQAM |
| 3681 | VMMHYGGFY |
| 3682 | VMQGFNYGF |
| 3683 | VMQMINLAH |
| 3684 | VMSDEWQTI |
| 3685 | VMTICQSQE |
| 3686 | VNADITFGA |
| 3687 | VNGREPRWK |
| 3688 | VNGREPRWQ |
| 3689 | VNITYTLQP |
| 3690 | VNMMCGHES |
| 3691 | VNRIRDMSV |
| 3692 | VNVDCNVQQ |
| 3693 | VPEISWSNH |
| 3694 | VPICCNLPM |
| 3695 | VPLGFNFAG |
| 3696 | VQHMSQSDY |
| 3697 | VQHMSQSGT |
| 3698 | VQHQEEFQT |
| 3699 | VQIRTIRQE |
| 3700 | VQKQEHAKY |
| 3701 | VQMWTIRQE |
| 3702 | VQNWKLDKI |
| 3703 | VQQFCFQHQ |
| 3704 | VRIQFSQAL |
| 3705 | VRQMIDHLA |
| 3706 | VRSGQQAIF |
| 3707 | VSAAWGQME |
| 3708 | VSAFGHKAG |
| 3709 | VSASFQQHV |
| 3710 | VSAVVGQME |
| 3711 | VSCEQGKIK |
| 3712 | VSDLWQSQE |
| 3713 | VSEHCQEGN |
| 3714 | VSEHCQEVF |
| 3715 | VSEPFEHCD |
| 3716 | VSEPHFHKD |
| 3717 | VSERDKIYG |
| 3718 | VSHNQIYGM |
| 3719 | VSLGTHAHH |
| 3720 | VSMNTPFCL |
| 3721 | VSMWYDRDD |
| 3722 | VSSAMTWMT |
| 3723 | VSSQYNHLE |
| 3724 | VSTRFPMAQ |
| 3725 | VSTRMYACS |
| 3726 | VSVNEDRAG |
| 3727 | VTAATGAST |
| 3728 | VTAPSNLVA |
| 3729 | VTCRQEGGG |
| 3730 | VTDQIWVHN |
| 3731 | VTDRADQNY |
| 3732 | VTDRIEQYH |
| 3733 | VTEHCVRQP |
| 3734 | VTEIRPSFG |
| 3735 | VTELNMAAW |
| 3736 | VTEPLEHCF |
| 3737 | VTESWNEHL |
| 3738 | VTGFGPATP |
| 3739 | VTHLSASSD |
| 3740 | VTIPVDYFT |
| 3741 | VTNVCQCEA |
| 3742 | VTQFCLSGK |
| 3743 | VTQSIQEVA |
| 3744 | VTSCGQENC |
| 3745 | VTTGMQIEE |
| 3746 | VTVAVQPCS |
| 3747 | VTVNGNAGW |
| 3748 | VVCDMLTSL |
| 3749 | VVCQPVPCV |
| 3750 | VVDNPMMGQ |
| 3751 | VVGLEGACK |
| 3752 | VVHEITINS |
| 3753 | VVHIEWRPT |
| 3754 | VVIPMPCCS |
| 3755 | VVKCKPQFC |
| 3756 | VVPPCMDCG |
| 3757 | VVSARVNVQ |
| 3758 | VVTAEFEFV |
| 3759 | VVVLEGSCK |
| 3760 | VWEIFDAMS |
| 3761 | VWSGQQAIF |
| 3762 | VWVCQHWVQ |
| 3763 | VYDEWTKNV |
| 3764 | VYEQMAYCP |
| 3765 | VYGHMQNWF |
| 3766 | VYLPYYWQF |
| 3767 | VYPDSAVQL |
| 3768 | VYQHWWRVH |
| 3769 | VYQHYFVDQ |
| 3770 | VYSFFYQNE |
| 3771 | VYTMRSALE |
| 3772 | VYVLASAQK |
| 3773 | VYYCEIREH |
| 3774 | WADDKKHYG |
| 3775 | WAECRYQTT |
| 3776 | WAGVEQRGE |
| 3777 | WAGWIPSSI |
| 3778 | WAIPMPHCQ |
| 3779 | WCCRPINAN |
| 3780 | WCDSVEPPG |
| 3781 | WCEHVIMNP |
| 3782 | WDAYYTNGI |
| 3783 | WDGQKMWYC |
| 3784 | WDSPKNFWI |
| 3785 | WDVRDHAFY |
| 3786 | WEVDVCNDR |
| 3787 | WEWNAKHKC |
| 3788 | WFEHASHVF |
| 3789 | WFKGVDHRQ |
| 3790 | WFMYLTNAL |
| 3791 | WFQTMDHVM |
| 3792 | WFYRHNHVE |
| 3793 | WGDARMIGP |
| 3794 | WGDKQATDR |
| 3795 | WHDYQLAAE |
| 3796 | WHFKIHVQP |
| 3797 | WHFLMIFYI |
| 3798 | WHGFGKWSR |
| 3799 | WHSHYLLHH |
| 3800 | WHVSHWPKL |
| 3801 | WHYPWDDWH |
| 3802 | WIGSKNSCE |
| 3803 | WITSKIKSD |
| 3804 | WITSKINSD |
| 3805 | WIYPFSFGL |
| 3806 | WKAIVLEYW |
| 3807 | WKWWADYLA |
| 3808 | WLFMHRWAD |
| 3809 | WLIEIERHG |
| 3810 | WLPLCFPCA |
| 3811 | WLPLCFPWA |
| 3812 | WLPMVMNKG |
| 3813 | WMEYINHEA |
| 3814 | WMMQYIIFP |
| 3815 | WMSEQMFKG |
| 3816 | WNNVELSTP |
| 3817 | WNQHKRDQR |
| 3818 | WNRELQPPG |
| 3819 | WNSCHQTWI |
| 3820 | WNYWLLPDD |
| 3821 | WPDSESEEV |
| 3822 | WPHTMDHVM |
| 3823 | WPKQGNAME |
| 3824 | WPQQGNAME |
| 3825 | WQAVIYANQ |
| 3826 | WQKLQGNRG |
| 3827 | WRFCIKIGM |
| 3828 | WSQSVAKML |
| 3829 | WSTGCMQGM |
| 3830 | WTANYDYYE |
| 3831 | WTCWLLGWF |
| 3832 | WVAHTTGHA |
| 3833 | WVEIKVMDQ |
| 3834 | WVYSLGRAE |
| 3835 | WWNHWLWNG |
| 3836 | WWRASHRDD |
| 3837 | WWWLSTGNQ |
| 3838 | YADMFQCEK |
| 3839 | YADMFQCVK |
| 3840 | YAGPNMHWG |
| 3841 | YAHLLNQQA |
| 3842 | YAILHQTSK |
| 3843 | YAITQSCFT |
| 3844 | YAITQSRST |
| 3845 | YAIWNMHFT |
| 3846 | YALQITRSQ |
| 3847 | YALVMGIHN |
| 3848 | YAQLMYIDP |
| 3849 | YASPQSGAW |
| 3850 | YATERYCVC |
| 3851 | YATSMHAHK |
| 3852 | YCCNQEPFA |
| 3853 | YCEPVQDNF |
| 3854 | YCISLIYHH |
| 3855 | YCQPVDQFY |
| 3856 | YCYLSSASC |
| 3857 | YCYVCQMTT |
| 3858 | YDNSVGHSL |
| 3859 | YDTNQIVCP |
| 3860 | YEDNNVMQI |
| 3861 | YEGRPSDAQ |
| 3862 | YESCNLTRG |
| 3863 | YFDWFYNHM |
| 3864 | YFDYHERKG |
| 3865 | YFGTSLRAQ |
| 3866 | YFHWHDCIG |
| 3867 | YFTTMHVMG |
| 3868 | YFWSNHFFR |
| 3869 | YGNLMGVGP |
| 3870 | YGTLCGVGI |
| 3871 | YHAPMLMCN |
| 3872 | YHIWCVYWA |
| 3873 | YIELRHREA |
| 3874 | YIFACGVKG |
| 3875 | YKPNYEIME |
| 3876 | YKQRISHWL |
| 3877 | YLGMWLAPV |
| 3878 | YLIPWPRLG |
| 3879 | YLMPHWFII |
| 3880 | YLSDMCWRG |
| 3881 | YLSFMCAIQ |
| 3882 | YLTLQGMQE |
| 3883 | YMDPVVAMN |
| 3884 | YMDRGNIGE |
| 3885 | YMERGNIGE |
| 3886 | YMSNIIHHN |
| 3887 | YMTTQTGYP |
| 3888 | YMTYIQSQE |
| 3889 | YNKQMMNCP |
| 3890 | YPAPYYPAE |
| 3891 | YPIQCSVSF |
| 3892 | YPYQGHNWT |
| 3893 | YQAHYMSMT |
| 3894 | YQDIHQCIF |
| 3895 | YQFCKPSDD |
| 3896 | YQFCKPSDE |
| 3897 | YQGEVERAF |
| 3898 | YQGYEPHMH |
| 3899 | YQHHYHLPW |
| 3900 | YQMQMTYVW |
| 3901 | YQQQMFERQ |
| 3902 | YQSQGIWIE |
| 3903 | YQTLCMHQD |
| 3904 | YQTVFTLYF |
| 3905 | YSAHWCKGD |
| 3906 | YSGVRVTGY |
| 3907 | YSKHQMCID |
| 3908 | YSNSTIMNL |
| 3909 | YSQFFSAEE |
| 3910 | YSQLMHGGH |
| 3911 | YSQSWNRLG |
| 3912 | YSQSWNRLW |
| 3913 | YSSELECQW |
| 3914 | YSTICNFSI |
| 3915 | YSTIHAGHP |
| 3916 | YSTTMHVMG |
| 3917 | YSVSFGCQS |
| 3918 | YTDPVLHNP |
| 3919 | YTGMSCTMK |
| 3920 | YTHEESAHF |
| 3921 | YTKTYVDCF |
| 3922 | YTQHLVGQY |
| 3923 | YTTFTEHWQ |
| 3924 | YVAEAHCSY |
| 3925 | YVCPSVNWN |
| 3926 | YVEDRNGWH |
| 3927 | YVENRNGWH |
| 3928 | YVHDHLHQQ |
| 3929 | YVNIHNRHG |
| 3930 | YVNIHNRNG |
| 3931 | YVNKDEFRF |
| 3932 | YVSVTLQNS |
| 3933 | YVTASWHGF |
| 3934 | YVYIRKNAL |
| 3935 | YWQSMLWQG |
| 3936 | YYCLRFVLE |
| 3937 | YYTQFSSDY |

[0214] In some embodiments, the engineered AAV VP capsid polypeptide comprises a polypeptide sequence represented by the formula: (A)-(X)—(B) wherein: (A) is the polypeptide sequence of SEQ ID NO: 5812 (VAYNVGGQMATNNQSSTTAP, corresponding to residues 561 to 580 of SEQ ID NO: 2); (X) is the 581-589 region having a polypeptide sequence selected from the list of polypeptides in TABLE 3 (SEQ ID NO: 3938-SEQ ID NO: 4237) that is expected to confer CNS tissue tropism or preference on a recombinant AAV virion (rAAV), based on a primary screen; and (B) is the polypeptide sequence of SEQ ID NO: 5813 (IVPGSVWMERDVYLQGPIWA, corresponding to residues 590 to 609 of SEQ ID NO: 2); and wherein the capsid polypeptide is capable of assembling into the rAAV and, the capsid does not have the sequence of any of SEQ ID NO: 1, SEQ ID NO: 3, SEQ ID NO: 4, SEQ ID NO: 5, SEQ ID NO: 6, SEQ ID NO: 7, or SEQ ID NO: 8. Also encompassed herein are rAAVs composed of engineered AAV5 VP2 capsid polypeptides and engineered AAV5 VP3 capsid polypeptides comprising a 581-589 region having a sequence selected from the list of polypeptides in TABLE 3 (SEQ ID NO: 3938-SEQ ID NO: 4237) at the region corresponding to amino acid residues 445 to 453 in AAV5 VP2 or the region corresponding to amino acid residues 389 to 397 in AAV5 VP3.

TABLE 3
Additional Sequences of 581-589 Regions

| SEQ ID | |
|---|---|
| NO | Sequence |
| 3938 | EAKWSGLGR |
| 3939 | QAYFYLMSS |
| 3940 | LFRQNQQFY |
| 3941 | QWRGYLSKA |
| 3942 | SFGWFDAHI |
| 3943 | DANQYHVSY |
| 3944 | QAFTNLDQM |
| 3945 | LGVYNQSFE |
| 3946 | HQSFVQCVH |
| 3947 | QYQSQWMSF |
| 3948 | HYSQYQNFT |
| 3949 | GNQQVNQQM |
| 3950 | LFNSMHQFD |
| 3951 | QASVYFWQQ |
| 3952 | RQSWVFVNH |
| 3953 | DAYKVQCYC |
| 3954 | EFMTSMTMM |
| 3955 | QFALINFDQ |
| 3956 | DASMIIMML |
| 3957 | QFSLVSLEA |
| 3958 | QHLFSNIIP |
| 3959 | TWFDMVMCD |
| 3960 | HAEYKDAGS |
| 3961 | QNSFYSQMG |
| 3962 | ELQQIYCAG |
| 3963 | SFEHLDCLL |
| 3964 | FYAFNMSDN |
| 3965 | LSWMQYEFL |
| 3966 | QSFNYLFYG |
| 3967 | RWQFIHLSK |
| 3968 | TFLMNFALD |
| 3969 | RWDTYGSWM |
| 3970 | GQQQSFSYQ |
| 3971 | LFTHCILNE |
| 3972 | PTDNINFQM |
| 3973 | SFVTFNNSW |
| 3974 | FTSSYKCYF |
| 3975 | QAHHYNILN |
| 3976 | LFDQFYSWS |
| 3977 | QWMGLIRWK |
| 3978 | HYLPFMYMQ |
| 3979 | LFNRSLRYE |
| 3980 | FWQLKHGAC |
| 3981 | LSLNELALL |
| 3982 | INFEMMDTD |
| 3983 | LSHTYIEIA |
| 3984 | DVAKYMYML |
| 3985 | PINSGIYWH |
| 3986 | ECSTSMGQF |
| 3987 | TSVFYQSNG |
| 3988 | TYSSFNFTC |
| 3989 | CSSFYFESK |
| 3990 | EATYTNAAC |
| 3991 | DAWQSNGWQ |
| 3992 | MIILILPYS |
| 3993 | EADTHWHHN |
| 3994 | RHLFWDILE |
| 3995 | EFMNASHHF |
| 3996 | QFQSVMQQY |
| 3997 | MWNQQDCKD |
| 3998 | RSEPCKNYG |
| 3999 | SIIQANSSF |
| 4000 | DATTSYVYC |
| 4001 | RFDINLDQF |
| 4002 | QWTENVMAR |
| 4003 | DSFYSSQQA |
| 4004 | PVTQYMSFM |
| 4005 | HSQVQQMQI |
| 4006 | FVQFWVGYQ |
| 4007 | YSKWIGIDQ |
| 4008 | YFSQYNVQS |
| 4009 | CAAHATAHQ |
| 4010 | VHSQITCED |
| 4011 | VIFNFYSMG |
| 4012 | LFSLRMIDR |
| 4013 | SWYCMQAIE |
| 4014 | LFLTLSTFN |
| 4015 | QAIGYRIWC |
| 4016 | QILLFNACR |
| 4017 | RTMDTNMFD |
| 4018 | LIQNCSSFG |
| 4019 | QWMVQHTNF |
| 4020 | LFSYVQNVH |
| 4021 | SMMFYRHCQ |
| 4022 | DATWIMQDN |
| 4023 | FAFQSNIEA |
| 4024 | SFDLMFRFY |
| 4025 | IAITWTSQC |
| 4026 | HGFYVFFFI |
| 4027 | MWMLKIDCT |
| 4028 | GFDYQGLSE |
| 4029 | RWFLQEQSN |
| 4030 | WFCSFYALQ |
| 4031 | HFMSYNSFF |
| 4032 | RSFLSYGLK |
| 4033 | NPMVTLANR |
| 4034 | TAQSIGSQH |
| 4035 | HFLSSMHQG |
| 4036 | LAMSSMFFH |
| 4037 | RVSNMLNCT |
| 4038 | DAQMIMSIE |
| 4039 | KIFTIHQFE |
| 4040 | DNDFFQAQF |
| 4041 | NIHYYGSGY |
| 4042 | RFDLFHEQY |
| 4043 | QFMLIEARF |
| 4044 | LFLYYHSAT |
| 4045 | SCSSHSQCC |
| 4046 | NFSSIGCHF |
| 4047 | IASWNQYHF |
| 4048 | EASSMQFWA |
| 4049 | QYEKSMTAF |
| 4050 | DAHHIMEGN |
| 4051 | LQIWYTEMF |
| 4052 | QMGNIYSSV |
| 4053 | NQSFYLHMS |
| 4054 | TSESSGVGG |
| 4055 | ELSFYQQFF |
| 4056 | MMVYFMQQA |
| 4057 | QAWFYQFDK |
| 4058 | GSDIHHEQF |
| 4059 | CAYMLGISQ |
| 4060 | EAMWIHFFG |
| 4061 | FFAANGQGC |
| 4062 | RFDLQNLMK |
| 4063 | QLRMWCCIH |
| 4064 | VDSTSSAFM |
| 4065 | RYQFWLNFT |
| 4066 | RFDSVQQYF |
| 4067 | IIHRYARWC |
| 4068 | DATHMITQS |
| 4069 | LHFFYSHSN |
| 4070 | TAAPIHVWM |
| 4071 | QALHIDCLH |
| 4072 | KFSTMLHAT |
| 4073 | NYSSSFVQM |
| 4074 | TFHQTSHWF |
| 4075 | SRLLNFCCI |
| 4076 | QADYSYSFL |
| 4077 | DYNRSDSYR |
| 4078 | LYGHKMQEN |
| 4079 | RFENSLTNE |
| 4080 | VAMPNMEYM |
| 4081 | AMCFYYMLE |
| 4082 | KGEQSIIFI |
| 4083 | FAMYVWMQA |
| 4084 | LFHSWMRYD |
| 4085 | FFTLKWHQF |
| 4086 | YAYAYQFCI |
| 4087 | AFIKHYLFE |
| 4088 | LTSNMLARD |
| 4089 | FSIMLMSSG |
| 4090 | QIQQYLSQF |
| 4091 | MALLKDGIE |
| 4092 | RYENFHQMD |
| 4093 | CAATNYHIH |
| 4094 | LFREISMNA |
| 4095 | QWHLFDAGV |
| 4096 | SANGGSIQM |
| 4097 | ATMSIMWAH |
| 4098 | DVSSTEAQF |
| 4099 | FLTSYTEKM |
| 4100 | SFSSLSGVA |
| 4101 | QHVQFTCLN |
| 4102 | AAQPWEHYY |
| 4103 | QMVSGDMGD |
| 4104 | LFSQYNGFM |
| 4105 | SGHQISDLF |
| 4106 | FMQIMQMQF |
| 4107 | LKLQLFNCG |
| 4108 | RFEQSMSVQ |
| 4109 | GNFFNNAIW |
| 4110 | FLMQYGDSC |
| 4111 | FAGVLLMCC |
| 4112 | FAFTSLINA |
| 4113 | LYSNLKRRR |
| 4114 | TISFCEFFN |
| 4115 | TFSLIFQMS |
| 4116 | NSGVVQSCF |
| 4117 | TGLEKIHFL |
| 4118 | FYYMYNSVV |
| 4119 | HTSHLGSQF |
| 4120 | QSVHVFYSW |
| 4121 | RYEPTSFMP |
| 4122 | LWAQYCKSE |
| 4123 | RFDQQGEYD |
| 4124 | QALQMDFLY |
| 4125 | DFTSTMTNG |
| 4126 | RQACAQNFQ |
| 4127 | AQYQWQMQF |
| 4128 | QWVVYHWQI |
| 4129 | LFQFQHRCR |
| 4130 | YTIMMHHLM |
| 4131 | LYQLFKRCY |
| 4132 | HAYQSITTS |
| 4133 | FFADFNKHC |
| 4134 | HSGFILALG |
| 4135 | TSWMMLQTH |
| 4136 | HIMYIGQYP |
| 4137 | VYNFLLDLG |
| 4138 | SFLPINLYA |
| 4139 | QSYQIQWIG |
| 4140 | DHFTFNFKC |
| 4141 | QDFSTFQSY |
| 4142 | RFDSKMENS |
| 4143 | AAVTAIMGE |
| 4144 | SGTSFGAML |
| 4145 | WSNPFIHYQ |
| 4146 | HVAQYNFAK |
| 4147 | RIIIHQFNE |
| 4148 | QAILAQNCM |
| 4149 | SFCMQMSSW |
| 4150 | GSQSNYHTA |
| 4151 | SMDPFSQNQ |
| 4152 | HGYFCQSFD |
| 4153 | DRHFFFFGI |
| 4154 | QYMSSQQCF |
| 4155 | NFTSNQQSY |
| 4156 | DCSLLNIWG |
| 4157 | MATSSSSSL |
| 4158 | NIMVYAQAR |
| 4159 | NAYTSIHNN |
| 4160 | LMQLFGVLR |
| 4161 | DSGSGITWH |
| 4162 | LFMHFNNMC |
| 4163 | HATSVAHHY |
| 4164 | ISEGHKNVL |
| 4165 | MNIVIEDKI |
| 4166 | AAQHSMLDS |
| 4167 | FWQYVNQQE |
| 4168 | RALDHLFSI |
| 4169 | QWEKYLKIM |
| 4170 | EAYNYQEMS |
| 4171 | LAYHTSWCQ |
| 4172 | NFCNCDFIL |
| 4173 | HHLFLFDSI |
| 4174 | FYQSAHFIF |
| 4175 | QGSYVACAE |
| 4176 | QAYCSHSCE |
| 4177 | QYRTTQDQN |
| 4178 | MNAPVFAQE |
| 4179 | ISSFQWAIA |
| 4180 | IMDLMQGCH |
| 4181 | QYQQNGTQH |
| 4182 | LYMHRGLYR |
| 4183 | CGYLWSSFA |
| 4184 | QSGESLSLM |
| 4185 | QNGQMQACN |
| 4186 | QFTSQSVQY |
| 4187 | LCSQYFDRI |
| 4188 | LIAPMFTDL |
| 4189 | RYCEKNQGK |
| 4190 | YSNSLWDSI |
| 4191 | FYALTMSCQ |
| 4192 | DTCYLQHAE |
| 4193 | LSLLAYNHI |
| 4194 | IWQLFNDCM |
| 4195 | LIGMQPFCN |
| 4196 | ESLSAYDKQ |
| 4197 | SFNQCQSTC |
| 4198 | RWSLIQQFE |
| 4199 | LFSSWMCFY |
| 4200 | GGISMHFFD |
| 4201 | QIGTIQAHS |
| 4202 | EWMYMQSGE |
| 4203 | QFYQNSQMP |
| 4204 | LATCSGQSI |
| 4205 | LSFDSNAHL |
| 4206 | SILFHQLIR |
| 4207 | SWQFSKQYL |
| 4208 | YALFELHND |
| 4209 | IICHIHTMM |
| 4210 | IFDPKIAWF |
| 4211 | LGHTQACML |
| 4212 | VMDSMHYFM |
| 4213 | RWDQLMVGE |
| 4214 | LFQFWKNCH |
| 4215 | LYAFYMSSE |
| 4216 | LFMSWQSTA |
| 4217 | KYENYQMLR |
| 4218 | DAILQSTHI |
| 4219 | LFNFYTVDW |
| 4220 | QAVSVTASI |
| 4221 | NHVSFQQSM |
| 4222 | FWASTGAYS |
| 4223 | KSQSTVYQD |
| 4224 | QTDHHHHCH |
| 4225 | QSFPIQAPA |
| 4226 | QMQQMSVMI |
| 4227 | QIHIQFDHC |
| 4228 | HYRGSKQWE |
| 4229 | CFDFQFEHF |
| 4230 | RASQMSGSM |
| 4231 | QASILQKNH |
| 4232 | QVSQQNQHF |
| 4233 | QYQQCNFGC |
| 4234 | ASFSNPAAT |
| 4235 | EAMYNNSFC |
| 4236 | DAYTSMSDW |
| 4237 | GNANFGNLL |

[0215] In some embodiments, the engineered AAV VP capsid polypeptide comprises a polypeptide sequence represented by the formula: (A)-(X)—(B) wherein: (A) is the polypeptide sequence of SEQ ID NO: 5812 (VAYNVGGQMATNNQSSTTAP, corresponding to residues 561 to 580 of SEQ ID NO: 2); (X) is the 581-589 region having a polypeptide sequence selected from the list of polypeptides in TABLE 4 (SEQ ID NO: 5234-SEQ ID NO: 5807) that is expected to confer CNS tissue tropism or preference on a recombinant AAV virion (rAAV), based on a primary screen; and (B) is the polypeptide sequence of SEQ ID NO: 5813 (IVPGSVWMERDVYLQGPIWA, corresponding to residues 590 to 609 of SEQ ID NO: 2); and wherein the capsid polypeptide is capable of assembling into the rAAV and, the capsid does not have the sequence of any of SEQ ID NO: 1, SEQ ID NO: 3, SEQ ID NO: 4, SEQ ID NO: 5, SEQ ID NO: 6, SEQ ID NO: 7, or SEQ ID NO: 8. Also encompassed herein are rAAVs composed of engineered AAV5 VP2 capsid polypeptides and engineered AAV5 VP3 capsid polypeptides comprising a 581-589 region having a sequence selected from the list of polypeptides in TABLE 4 (SEQ ID NO: 5234-SEQ ID NO: 5807) at the region corresponding to amino acid residues 445 to 453 in AAV5 VP2 or the region corresponding to amino acid residues 389 to 397 in AAV5 VP3.

TABLE 4
Additional Sequences of 581-589 Regions
for CNS Tropism

| SEQ ID | |
|---|---|
| NO | Sequence |
| 5234 | AADGYVAQD |
| 5235 | AAMSSSHSY |
| 5236 | AARMVGEFY |
| 5237 | ACSQIGQDD |
| 5238 | ADYSMMWHM |
| 5239 | AEHMVVDHE |
| 5240 | AERDHKTIY |
| 5241 | AFARQEYAN |
| 5242 | AGMYKCQED |
| 5243 | AHQTAWAWI |
| 5244 | AHQTPWAWI |
| 5245 | AIGPALCLT |
| 5246 | AIGPDRSNN |
| 5247 | AKCTILNFQ |
| 5248 | AKRECTHIP |
| 5249 | ALQYCQGKD |
| 5250 | ANGTRECQS |
| 5251 | ANLISQGHC |
| 5252 | ANRMIWYPY |
| 5253 | AQCHDMWGH |
| 5254 | ARKNCDHLN |
| 5255 | ARSGINGHE |
| 5256 | ASMHEETCL |
| 5257 | ASRSCMTQE |
| 5258 | ATDMIFVSN |
| 5259 | ATGTYNLQE |
| 5260 | AVAEIRPEP |
| 5261 | AVHWHRKCE |
| 5262 | AVNEAQDNR |
| 5263 | AVTQLSVER |
| 5264 | AVYLDHVFS |
| 5265 | AWSYTGACY |
| 5266 | AYAPSKNAM |
| 5267 | CAGMAWSHS |
| 5268 | CAWHMKQGN |
| 5269 | CCCVPRSIY |
| 5270 | CCLWSYWAF |
| 5271 | CHILDGLHD |
| 5272 | CIMLNGCFQ |
| 5273 | CIQPTWDSY |
| 5274 | CIRFMMREG |
| 5275 | CKQLFCELG |
| 5276 | CNEVCRNYL |
| 5277 | CNYPIIWDK |
| 5278 | CRMITMMNE |
| 5279 | CVDTNRMWQ |
| 5280 | CVFSRNNYQ |
| 5281 | CVKPFLTGW |
| 5282 | CVNLMAVNN |
| 5283 | CVRIGMREP |
| 5284 | CWGPIMHPF |
| 5285 | DARKTYICY |
| 5286 | DATRAQTGE |
| 5287 | DCRCYDCHD |
| 5288 | DEAKKSCWQ |
| 5289 | DEGYIMFAP |
| 5290 | DGEFLHEVL |
| 5291 | DHCHCIAHP |
| 5292 | DHIHIERAN |
| 5293 | DHLSICCQN |
| 5294 | DIATMRNTW |
| 5295 | DICQKQSPN |
| 5296 | DIEFLDCEN |
| 5297 | DKMSLQVQI |
| 5298 | DLVDLRSWM |
| 5299 | DMTLQSVSS |
| 5300 | DNYWIVPFA |
| 5301 | DPGWYGLAP |
| 5302 | DQFCPFDHY |
| 5303 | DQRMLLKEL |
| 5304 | DQSMMTIGQ |
| 5305 | DRKQADQIY |
| 5306 | DSAKQWHHQ |
| 5307 | DTAFMHHHV |
| 5308 | DTHHVHGWQ |
| 5309 | DVCRKPVSH |
| 5310 | DVIRDMIAE |
| 5311 | DVKSWAVCD |
| 5312 | DVMQYQNHM |
| 5313 | DVRACMEDL |
| 5314 | DVTQTRYCY |
| 5315 | DWRYFCVSL |
| 5316 | EAYITYNKA |
| 5317 | ECIFAPRMS |
| 5318 | EDGLIVYGP |
| 5319 | EERPWEWET |
| 5320 | EFDWLLGTI |
| 5321 | EFKCVSDCL |
| 5322 | EGATAWQDR |
| 5323 | EHSSPREDN |
| 5324 | EICMRSGFI |
| 5325 | EIIQAHLIN |
| 5326 | EITQHFVKH |
| 5327 | EKRLEGWVY |
| 5328 | ELPDTEVPW |
| 5329 | ELRMSFTKV |
| 5330 | EPLVCISAG |
| 5331 | EPMPMPVWN |
| 5332 | EQLRDLNIE |
| 5333 | EQPHISIKG |
| 5334 | ERFKTFCEE |
| 5335 | ERKTTADWK |
| 5336 | ERQAHNHYA |
| 5337 | ERTACKMKS |
| 5338 | ERYYPISSF |
| 5339 | ESRQVQDCY |
| 5340 | ETEIRQMDG |
| 5341 | ETHRGTVGL |
| 5342 | EVRSTRKNH |
| 5343 | EWEGVSQFR |
| 5344 | EWHARHHYW |
| 5345 | EYCEFMSEA |
| 5346 | EYSRCCHQE |
| 5347 | FAESMWCDR |
| 5348 | FAPEFDNHC |
| 5349 | FAQQIINAS |
| 5350 | FCVKSPRVD |
| 5351 | FKPFAQQWN |
| 5352 | FLTCDQFEW |
| 5353 | FNTPYAHIG |
| 5354 | FQTSINYYG |
| 5355 | FRAVYYYHS |
| 5356 | FRDVCMHDV |
| 5357 | FSYQIQCQN |
| 5358 | FTEWKPVFF |
| 5359 | FTHSCCCLS |
| 5360 | GAGPVQSEE |
| 5361 | GAKYIQNTD |
| 5362 | GCLTSECAY |
| 5363 | GCMCIRHAY |
| 5364 | GDMCEDMCT |
| 5365 | GDVSYDAEA |
| 5366 | GEMTRCFHN |
| 5367 | GFQRTHVDQ |
| 5368 | GFTPDRCRN |
| 5369 | GGCCGGELN |
| 5370 | GGDGRVHNK |
| 5371 | GGDRMATDR |
| 5372 | GGSYVSAPD |
| 5373 | GHMFETFWG |
| 5374 | GIDLMRQIN |
| 5375 | GIHQLIHHC |
| 5376 | GLFHPQFGQ |
| 5377 | GMSDCEVSF |
| 5378 | GNECFHNVE |
| 5379 | GNKSPDECF |
| 5380 | GPARSFEAC |
| 5381 | GQPVWCVCM |
| 5382 | GREITQVMS |
| 5383 | GRWMCNEAE |
| 5384 | GSCCLNNET |
| 5385 | GSKIIMHTE |
| 5386 | GSQQTTLSC |
| 5387 | GSYIVQNHC |
| 5388 | GTEPIMWRD |
| 5389 | GTIRMPEHR |
| 5390 | GTNAYMAHK |
| 5391 | GVHHRCRMT |
| 5392 | GVITVDAKG |
| 5393 | GWDMLSVAK |
| 5394 | GYKFIGRSR |
| 5395 | GYNYYWQHA |
| 5396 | GYTQQDEHF |
| 5397 | HEGLIMRLE |
| 5398 | HEVRRYGQN |
| 5399 | HFEVRSVQR |
| 5400 | HGFKCQYSF |
| 5401 | HHRVNYEMY |
| 5402 | HIGWMGWLR |
| 5403 | HLMPRNQCF |
| 5404 | HLWMCPPRY |
| 5405 | HMGIAYNDH |
| 5406 | HMSQAGVVS |
| 5407 | HPLPNTEIC |
| 5408 | HQSPIHTNT |
| 5409 | HSLVQQLHP |
| 5410 | HSTNLFEAK |
| 5411 | HTLQWEAVR |
| 5412 | HTRKEGENS |
| 5413 | HVTMNQLYS |
| 5414 | IADDYFMCH |
| 5415 | IAKIGNCVW |
| 5416 | IAMRCWGNE |
| 5417 | IATHNHILN |
| 5418 | IATKSNCHK |
| 5419 | ICNMDFRCA |
| 5420 | IECSPRESI |
| 5421 | IEHCSNRYA |
| 5422 | IGQYFNFHF |
| 5423 | IHFTSQSCL |
| 5424 | IHGIDCYEI |
| 5425 | IHPMMRENG |
| 5426 | IIRQSEQYH |
| 5427 | ILINDREWG |
| 5428 | IMCHARMMA |
| 5429 | IMNPTAQNN |
| 5430 | IPAEWDSWR |
| 5431 | IPRPFFTMH |
| 5432 | IQAVMASGW |
| 5433 | IRPQYAKMD |
| 5434 | IRRSMQQQN |
| 5435 | ISQRGTLWC |
| 5436 | ISRMLRQSS |
| 5437 | ISTKFGKEI |
| 5438 | KAIWQGTEN |
| 5439 | KALHYAMIK |
| 5440 | KARQDDVNT |
| 5441 | KATHCDKYV |
| 5442 | KATVEGSWR |
| 5443 | KAVLFLKDC |
| 5444 | KCADLIIRS |
| 5445 | KCLPYMEMF |
| 5446 | KCNDIVLYH |
| 5447 | KCNVITYHG |
| 5448 | KCTMITPCF |
| 5449 | KDGYREAWM |
| 5450 | KDNQSCEWN |
| 5451 | KEAYTDMSC |
| 5452 | KENKIMQAS |
| 5453 | KFGFMYNEF |
| 5454 | KGEIEGGAK |
| 5455 | KGLITENNY |
| 5456 | KGTPNWWGP |
| 5457 | KHITWNHCL |
| 5458 | KHIVGQDGG |
| 5459 | KHTLAEMYG |
| 5460 | KIDAHSNME |
| 5461 | KIGCMYSSQ |
| 5462 | KIIFELGMD |
| 5463 | KISPWDGFY |
| 5464 | KIWAGVNLG |
| 5465 | KIYMQCDQE |
| 5466 | KKTECEMIV |
| 5467 | KKTLYEMAC |
| 5468 | KMAGIGCWY |
| 5469 | KMCWWPESM |
| 5470 | KMHGNERCF |
| 5471 | KMLHKVWID |
| 5472 | KMMAFEKQC |
| 5473 | KMNTWDQAR |
| 5474 | KNELENVIN |
| 5475 | KPAGKNTCW |
| 5476 | KPDHAMAQQ |
| 5477 | KPLTYTVGS |
| 5478 | KQKTQNRNA |
| 5479 | KQLFMKFWN |
| 5480 | KRTDLHAAD |
| 5481 | KRVQQMETM |
| 5482 | KRWLHMYQG |
| 5483 | KSAPRENFN |
| 5484 | KSGWGAPYE |
| 5485 | KSMTCVYYP |
| 5486 | KSTYYNLKW |
| 5487 | KSVHYETCE |
| 5488 | KSWVWVDTE |
| 5489 | KTCLCIFTK |
| 5490 | KTDPIAEYC |
| 5491 | KTEKWASHE |
| 5492 | KTFTKEVTP |
| 5493 | KTLPFAIYH |
| 5494 | KTMADMYNR |
| 5495 | KTQTHTSEP |
| 5496 | KTSNVMDQM |
| 5497 | KTVETYAAH |
| 5498 | KVAEGQNML |
| 5499 | KVAGGHETT |
| 5500 | KVDTVRNPK |
| 5501 | KVESTTQLC |
| 5502 | KWDDMHTQM |
| 5503 | KYMQENVLS |
| 5504 | LAAIQHCAM |
| 5505 | LACTPRCIF |
| 5506 | LADCMLNHH |
| 5507 | LAESKKRNK |
| 5508 | LATTTSYHC |
| 5509 | LCTSTERQG |
| 5510 | LEQLDRCMY |
| 5511 | LFMTYSARN |
| 5512 | LFYSPMHTH |
| 5513 | LILQRNVKD |
| 5514 | LLWRRVKRT |
| 5515 | LNELPRAEY |
| 5516 | LNHPIADYD |
| 5517 | LPPPEEKWL |
| 5518 | LPTQVYGHN |
| 5519 | LTCMHASTP |
| 5520 | LTPRSEGLP |
| 5521 | LTQYKALAQ |
| 5522 | LVGRTYQHQ |
| 5523 | LWDRFCCPV |
| 5524 | LWSRFISMD |
| 5525 | LYMMALLPT |
| 5526 | MAAITQNVA |
| 5527 | MAGHIGHHS |
| 5528 | MAQPYGRTA |
| 5529 | MARQCHSFH |
| 5530 | MCRPVMMIE |
| 5531 | MCSQTISMR |
| 5532 | MDGHFSVGC |
| 5533 | MDGRDEIIH |
| 5534 | MDPDIPHCR |
| 5535 | MDVQQIISG |
| 5536 | MEHTMDFGV |
| 5537 | MFDMMSVLK |
| 5538 | MFVVNQNWA |
| 5539 | MGQRSAANY |
| 5540 | MGRPHAWWG |
| 5541 | MIKPLLVVG |
| 5542 | MIRPSINGS |
| 5543 | MKNQPTGAS |
| 5544 | MKTIMQDYF |
| 5545 | MLFDFEEHN |
| 5546 | MLGVAPGHL |
| 5547 | MLPLEMKNL |
| 5548 | MMVRELMSS |
| 5549 | MPSWYIAQA |
| 5550 | MQHLPPAMT |
| 5551 | MQLRIHTNS |
| 5552 | MQYRGMSAS |
| 5553 | MRQRTYICQ |
| 5554 | MRRKTPEDD |
| 5555 | MRYHWDEAG |
| 5556 | MSLQHHFCT |
| 5557 | MSNLEYYEA |
| 5558 | MTDNNGPLF |
| 5559 | MTGIGKCWN |
| 5560 | MTRSCQTEG |
| 5561 | MYTGMRCWR |
| 5562 | NAGMKGVDV |
| 5563 | NAGVVKVWP |
| 5564 | NAIPYFVQA |
| 5565 | NAKYSMLYG |
| 5566 | NAQRLAVGM |
| 5567 | NARVMAKRE |
| 5568 | NCPMYDMIS |
| 5569 | NERDQCQWP |
| 5570 | NHSLCWDSK |
| 5571 | NLERCNTMM |
| 5572 | NMWYSFVMI |
| 5573 | NQREWHGLA |
| 5574 | NQRGFCKDE |
| 5575 | NRCGVSKCC |
| 5576 | NRIQMTDFQ |
| 5577 | NSTRNTSYY |
| 5578 | NSTRWYHTG |
| 5579 | NTAKLGWGL |
| 5580 | NTCEGWSHF |
| 5581 | NTGVKFCAC |
| 5582 | NTQYSAKND |
| 5583 | NTRIVCDLS |
| 5584 | NTSELLMAQ |
| 5585 | NVCDNGHEI |
| 5586 | NVFPAETHV |
| 5587 | NVMGTQAKE |
| 5588 | NVTTMFGQK |
| 5589 | NWEVIGRWH |
| 5590 | NWNHCHQWR |
| 5591 | NWTGNMQWA |
| 5592 | NYCKYNKMR |
| 5593 | PAWRRYCWT |
| 5594 | PEKWIHMHE |
| 5595 | PIHTYKRHP |
| 5596 | PIKGVAVQE |
| 5597 | PLNQEQIPQ |
| 5598 | PRNLVAMYW |
| 5599 | PVKPIIHAS |
| 5600 | PWMHTMLNP |
| 5601 | QAAVTKEYW |
| 5602 | QAKMILDGT |
| 5603 | QANPYNHGI |
| 5604 | QAVIAVDGR |
| 5605 | QCAHFYQTR |
| 5606 | QCGCAPMDS |
| 5607 | QCGFIRLNE |
| 5608 | QCQSQEWFH |
| 5609 | QDCERQVFA |
| 5610 | QEAGYTRHN |
| 5611 | QFCICCDGM |
| 5612 | QGENAQHHN |
| 5613 | QGFSTDVKP |
| 5614 | QGQHVMVHS |
| 5615 | QHLMTFSHE |
| 5616 | QHQAFFVFT |
| 5617 | QIKTHSNVF |
| 5618 | QKPTIWDHF |
| 5619 | QKSMLNSIQ |
| 5620 | QLKRNEQTS |
| 5621 | QMKGATEFC |
| 5622 | QMNAIQLCV |
| 5623 | QMVTQLNWE |
| 5624 | QNKHNWWIM |
| 5625 | QPKMWMMAS |
| 5626 | QPRVYEGFY |
| 5627 | QPYWVAVDP |
| 5628 | QQTWEQMQR |
| 5629 | QRGPLQHQQ |
| 5630 | QRNNLFVHD |
| 5631 | QSAHPEPMC |
| 5632 | QSGTCHYHD |
| 5633 | QSRQMMLLH |
| 5634 | QSTPTLGPK |
| 5635 | QSWWHSDTC |
| 5636 | QTDILRDVQ |
| 5637 | QTGTGHWFE |
| 5638 | QTGVMAAFG |
| 5639 | QTLGGHMWT |
| 5640 | QVACHMTNP |
| 5641 | QVHIGSWPP |
| 5642 | QVMQEKVRC |
| 5643 | QVNMFMMPC |
| 5644 | QVRFEQNPA |
| 5645 | QVSFVGCNH |
| 5646 | QVSHISEHW |
| 5647 | QWAPLQTWA |
| 5648 | QWEEVWWEA |
| 5649 | QYLLIPHLP |
| 5650 | QYQSTGVVR |
| 5651 | QYWWPATHD |
| 5652 | RAERYFKDE |
| 5653 | RAIYNDMTE |
| 5654 | RCVQAHFHK |
| 5655 | RDIWERPCV |
| 5656 | REEWKNASN |
| 5657 | REMMIVNCD |
| 5658 | RGKPILNQQ |
| 5659 | RITQGESGM |
| 5660 | RKWMNAKAT |
| 5661 | RLAWIEQSP |
| 5662 | RMMWQSHCG |
| 5663 | RMVLAYGNF |
| 5664 | RNDWQQVFS |
| 5665 | RQTTYDCLD |
| 5666 | RREAMDDSP |
| 5667 | RSDEMYVTP |
| 5668 | RTRISQMFG |
| 5669 | RTVPTQEMS |
| 5670 | RVAGEGIQP |
| 5671 | RVWSLEWHL |
| 5672 | RYNNCPNLW |
| 5673 | RYQSHCWLH |
| 5674 | SADRTAMFH |
| 5675 | SALYRWGHV |
| 5676 | SANQRYHDW |
| 5677 | SAPRNEITR |
| 5678 | SCQLLNDGG |
| 5679 | SFKSVSQYN |
| 5680 | SFPMILVNC |
| 5681 | SIAQDQVWS |
| 5682 | SIRYDFYVP |
| 5683 | SIYQKWVTN |
| 5684 | SKGDLCHQQ |
| 5685 | SKGWADPCP |
| 5686 | SMQYFFKTE |
| 5687 | SMRDLIAEA |
| 5688 | SMSHNGQCL |
| 5689 | SNRYYSRIF |
| 5690 | SPNGRGLCG |
| 5691 | SQIQIRQAD |
| 5692 | SQMKYAHNQ |
| 5693 | SQSRTIIQE |
| 5694 | SRDIAKSST |
| 5695 | SRLYKKRLF |
| 5696 | SRTRMYMDH |
| 5697 | SRVMIHVYV |
| 5698 | SSVVMAKQP |
| 5699 | STLEDEKPY |
| 5700 | STQKVPVLA |
| 5701 | STRPIACHS |
| 5702 | SVETARCSG |
| 5703 | SVGYIYDQS |
| 5704 | SVKDPMDWG |
| 5705 | SVTPDSITT |
| 5706 | TAGQQPTFM |
| 5707 | TARDREHAM |
| 5708 | TARSTSDKC |
| 5709 | TCKWYEESI |
| 5710 | TCTNSEPHP |
| 5711 | TCYCHRAHE |
| 5712 | TEEVQFVVH |
| 5713 | TFMFNSEWS |
| 5714 | TFMRKICGM |
| 5715 | TFVRKPSLM |
| 5716 | THSSCWYQD |
| 5717 | TISQIPWVR |
| 5718 | TKLSMMGCE |
| 5719 | TKQFFTAHC |
| 5720 | TKYHYHVKV |
| 5721 | TLEPAYRHE |
| 5722 | TLLLVGKDR |
| 5723 | TMAQKGLWF |
| 5724 | TMPDRDPTY |
| 5725 | TMRLFWDMG |
| 5726 | TNFPTSMHG |
| 5727 | TPKSEGICC |
| 5728 | TQAKIECCS |
| 5729 | TQEACHHDP |
| 5730 | TQNACKVRT |
| 5731 | TRHPTIAMH |
| 5732 | TRILNEFFC |
| 5733 | TSEPHCSYA |
| 5734 | TSERHSCMV |
| 5735 | TSMEFTQHQ |
| 5736 | TSNHNMALE |
| 5737 | TTAYHRSDH |
| 5738 | TTTITNRLC |
| 5739 | TTTNQFMFQ |
| 5740 | TVCGSFHGC |
| 5741 | TVIRDSRSY |
| 5742 | TVRHQMDAY |
| 5743 | TVTHMSTWG |
| 5744 | TWHKQLVGV |
| 5745 | TYASTRNFH |
| 5746 | TYDTRNHCL |
| 5747 | TYLHQPEDS |
| 5748 | TYWCPLMMN |
| 5749 | VAADSRMMI |
| 5750 | VADTWQVHC |
| 5751 | VADWIGHTP |
| 5752 | VAYPIQTDV |
| 5753 | VCGWWHQYW |
| 5754 | VCHNPDPFT |
| 5755 | VFGSTRSAA |
| 5756 | VFNLMLQDK |
| 5757 | VGIWFIPCR |
| 5758 | VHVHCMIGS |
| 5759 | VICRMKKHS |
| 5760 | VIKVNTVNP |
| 5761 | VKAWWHDHQ |
| 5762 | VKHTAVDVP |
| 5763 | VLKSCDRHG |
| 5764 | VMFYWRYNS |
| 5765 | VPMWAHWQN |
| 5766 | VPTGRRVKL |
| 5767 | VPVATMIHH |
| 5768 | VRADNMPVM |
| 5769 | VSAYIERQW |
| 5770 | VSKFIAASW |
| 5771 | VSRCGIDRS |
| 5772 | VSVQSRAQL |
| 5773 | VTMTTKSVW |
| 5774 | VWWMIIHTS |
| 5775 | WAIFGDIHH |
| 5776 | WAYYIRLQP |
| 5777 | WCEAVGDYA |
| 5778 | WCESWGPQG |
| 5779 | WCRCKRFIE |
| 5780 | WDGRPDLST |
| 5781 | WFSIIMSKL |
| 5782 | WINEANCLM |
| 5783 | WIRSAQRPG |
| 5784 | WKDDLRSTY |
| 5785 | WKWYGLPHH |
| 5786 | WPNIKHQPI |
| 5787 | WPTMLSAHM |
| 5788 | WSCRSICPP |
| 5789 | WVEPEQCFG |
| 5790 | WVKQKDVLC |
| 5791 | WVYSHEKHY |
| 5792 | YDLWGWSTR |
| 5793 | YDYWMQAPT |
| 5794 | YEHPIMWPV |
| 5795 | YEICKHGHF |
| 5796 | YFADAWLKT |
| 5797 | YFPSIQCYE |
| 5798 | YGGSEHWGP |
| 4799 | YGNSVTCTS |
| 5800 | YHCCFAMQS |
| 5801 | YMSWYQIRN |
| 5802 | YPAQYTAFS |
| 5803 | YPQPCSCHS |
| 5804 | YPVHMMPPL |
| 5805 | YRDRCWNRI |
| 5806 | YTELMKKAC |
| 5807 | YTNHYYNAR |

[0216] In some embodiments, the engineered AAV VP capsid polypeptide confers CNS tissue tropism or preference, wherein the CNS tissue is selected from the group consisting of hippocampus: (dentate gyrus, CA1 and CA3); cerebellum, hypothalamus, cortex: (occipital, temporal and forebrain); substantia nigra, thalamus, and any combination thereof.

[0217] In some embodiments, the engineered AAV VP capsid polypeptide comprises a polypeptide sequence represented by the formula: (A)-(X)—(B) wherein: (A) is the polypeptide sequence of SEQ ID NO: 5812 (VAYNVGGQMATNNQSSTTAP, corresponding to residues 561 to 580 of SEQ ID NO: 2); (X) is the 581-589 region having a polypeptide sequence selected from the list of polypeptides in TABLE 10 that is expected to confer cardiac muscle tissue tropism or preference on a recombinant AAV virion (rAAV), based on a secondary screen; and (B) is the polypeptide sequence of SEQ ID NO: 5813 (IVPGSVWMERDVYLQGPIWA, corresponding to residues 590 to 609 of SEQ ID NO: 2); and wherein the capsid polypeptide is capable of assembling into the rAAV and, the capsid does not have the sequence of any of SEQ ID NO: 1, SEQ ID NO: 3, SEQ ID NO: 4, SEQ ID NO: 5, SEQ ID NO: 6, SEQ ID NO: 7, or SEQ ID NO: 8. Also encompassed herein are rAAVs composed of engineered AAV5 VP2 capsid polypeptides and engineered AAV5 VP3 capsid polypeptides comprising a 581-589 region having a sequence selected from the list of polypeptides in TABLE 10 at the region corresponding to amino acid residues 445 to 453 in AAV5 VP2 or the region corresponding to amino acid residues 389 to 397 in AAV5 VP3.

[0218] In some embodiments, a 581-589 region of an AAV5 VP capsid polypeptide has a sequence that is at least 75%, at least 77.7%, at least 85%, at least 88.8%, or 100% identical to a sequence provided in TABLE 10. In some embodiments, a 581-589 region of an AAV5 VP capsid polypeptide has a sequence that is at least 75%, at least 77.7%, at least 85%, at least 88.8% or 100% identical to SEQ ID NO: 348. In some embodiments, a 581-589 region of an AAV5 VP capsid polypeptide has a sequence that is at least 75%, at least 77.7%, at least 85%, at least 88.8% or 100% identical to SEQ ID NO: 2536. In some embodiments, a 581-589 region of an AAV5 VP capsid polypeptide has a sequence that is at least 75%, at least 77.7%, at least 85%, at least 88.8% or 100% identical to SEQ ID NO: 5607. In some embodiments, a 581-589 region of an AAV5 VP capsid polypeptide has a sequence that is at least 75%, at least 77.7%, at least 85%, at least 88.8% or 100% identical to SEQ ID NO: 1576. In some embodiments, a 581-589 region of an AAV5 VP capsid polypeptide has a sequence that is at least 75%, at least 77.7%, at least 85%, at least 88.8% or 100% identical to SEQ ID NO: 4955. In some embodiments, a 581-589 region of an AAV5 VP capsid polypeptide has a sequence that is at least 75%, at least 77.7%, at least 85%, at least 88.8% or 100% identical to SEQ ID NO: 5017. In some embodiments, a 581-589 region of an AAV5 VP capsid polypeptide has a sequence that is at least 75%, at least 77.7%, at least 85%, at least 88.8% or 100% identical to SEQ ID NO: 4349. In some embodiments, a 581-589 region of an AAV5 VP capsid polypeptide has a sequence that is at least 75%, at least 77.7%, at least 85%, at least 88.8% or 100% identical to SEQ ID NO: 4964. In some embodiments, a 581-589 region of an AAV5 VP capsid polypeptide has a sequence that is at least 75%, at least 77.7%, at least 85%, at least 88.8% or 100% identical to SEQ ID NO: 293. In some embodiments, a 581-589 region of an AAV5 VP capsid polypeptide has a sequence that is at least 75%, at least 77.7%, at least 85%, at least 88.8% or 100% identical to SEQ ID NO: 4314. In some embodiments, a 581-589 region of an AAV5 VP capsid polypeptide has a sequence that is at least 75%, at least 77.7%, at least 85%, at least 88.8% or 100% identical to SEQ ID NO: 4995. In some embodiments, a 581-589 region of an AAV5 VP capsid polypeptide has a sequence that is at least 75%, at least 77.7%, at least 85%, at least 88.8% or 100% identical to SEQ ID NO: 4366. In some embodiments, a 581-589 region of an AAV5 VP capsid polypeptide has a sequence that is at least 75%, at least 77.7%, at least 85%, at least 88.8% or 100% identical to SEQ ID NO: 4961. In some embodiments, a 581-589 region of an AAV5 VP capsid polypeptide has a sequence that is at least 75%, at least 77.7%, at least 85%, at least 88.8% or 100% identical to SEQ ID NO: 4952. In some embodiments, a 581-589 region of an AAV5 VP capsid polypeptide has a sequence that is at least 75%, at least 77.7%, at least 85%, at least 88.8% or 100% identical to SEQ ID NO: 5075. In some embodiments, a 581-589 region of an AAV5 VP capsid polypeptide has a sequence that is at least 75%, at least 77.7%, at least 85%, at least 88.8% or 100% identical to SEQ ID NO: 4354. In some embodiments, a 581-589 region of an AAV5 VP capsid polypeptide has a sequence that is at least 75%, at least 77.7%, at least 85%, at least 88.8% or 100% identical to SEQ ID NO: 5060. In some embodiments, a 581-589 region of an AAV5 VP capsid polypeptide has a sequence that is at least 75%, at least 77.7%, at least 85%, at least 88.8% or 100% identical to SEQ ID NO: 5138. In some embodiments, a 581-589 region of an AAV5 VP capsid polypeptide has a sequence that is at least 75%, at least 77.7%, at least 85%, at least 88.8% or 100% identical to SEQ ID NO: 5206. In some embodiments, a 581-589 region of an AAV5 VP capsid polypeptide has a sequence that is at least 75%, at least 77.7%, at least 85%, at least 88.8% or 100% identical to SEQ ID NO: 4288. In some embodiments, a 581-589 region of an AAV5 VP capsid polypeptide has a sequence that is at least 75%, at least 77.7%, at least 85%, at least 88.8% or 100% identical to SEQ ID NO: 5092. In some embodiments, a 581-589 region of an AAV5 VP capsid polypeptide has a sequence that is at least 75%, at least 77.7%, at least 85%, at least 88.8% or 100% identical to SEQ ID NO: 4059. In some embodiments, a 581-589 region of an AAV5 VP capsid polypeptide has a sequence that is at least 75%, at least 77.7%, at least 85%, at least 88.8% or 100% identical to SEQ ID NO: 4295. In some embodiments, a 581-589 region of an AAV5 VP capsid polypeptide has a sequence that is at least 75%, at least 77.7%, at least 85%, at least 88.8% or 100% identical to SEQ ID NO: 5030. In some embodiments, a 581-589 region of an AAV5 VP capsid polypeptide has a sequence that is at least 75%, at least 77.7%, at least 85%, at least 88.8% or 100% identical to SEQ ID NO: 4938. In some embodiments, a 581-589 region of an AAV5 VP capsid polypeptide has a sequence that is at least 75%, at least 77.7%, at least 85%, at least 88.8% or 100% identical to SEQ ID NO: 2661. In some embodiments, a 581-589 region of an AAV5 VP capsid polypeptide has a sequence that is at least 75%, at least 77.7%, at least 85%, at least 88.8% or 100% identical to SEQ ID NO: 5215. In some embodiments, a 581-589 region of an AAV5 VP capsid polypeptide has a sequence that is at least 75%, at least 77.7%, at least 85%, at least 88.8% or 100% identical to SEQ ID NO: 4960. In some embodiments, a 581-589 region of an AAV5 VP capsid polypeptide has a sequence that is at least 75%, at least 77.7%, at least 85%, at least 88.8% or 100% identical to SEQ ID NO: 4969. In some embodiments, a 581-589 region of an AAV5 VP capsid polypeptide has a sequence that is at least 75%, at least 77.7%, at least 85%, at least 88.8% or 100% identical to SEQ ID NO: 5023.

[0219] In some embodiments, a 581-589 region of an AAV5 VP capsid polypeptide has a sequence of SEQ ID NO: 348. In some embodiments, a 581-589 region of an AAV5 VP capsid polypeptide has a sequence of SEQ ID NO: 2536. In some embodiments, a 581-589 region of an AAV5 VP capsid polypeptide has a sequence of SEQ ID NO: 5607. In some embodiments, a 581-589 region of an AAV5 VP capsid polypeptide has a sequence of SEQ ID NO: 1576. In some embodiments, a 581-589 region of an AAV5 VP capsid polypeptide has a sequence of SEQ ID NO: 4955. In some embodiments, a 581-589 region of an AAV5 VP capsid polypeptide has a sequence of SEQ ID NO: 5017. In some embodiments, a 581-589 region of an AAV5 VP capsid polypeptide has a sequence of SEQ ID NO: 4349. In some embodiments, a 581-589 region of an AAV5 VP capsid polypeptide has a sequence of SEQ ID NO: 4964. In some embodiments, a 581-589 region of an AAV5 VP capsid polypeptide has a sequence of SEQ ID NO: 293. In some embodiments, a 581-589 region of an AAV5 VP capsid polypeptide has a sequence of SEQ ID NO: 4314. In some embodiments, a 581-589 region of an AAV5 VP capsid polypeptide has a sequence of SEQ ID NO: 4995. In some embodiments, a 581-589 region of an AAV5 VP capsid polypeptide has a sequence of SEQ ID NO: 4366. In some embodiments, a 581-589 region of an AAV5 VP capsid polypeptide has a sequence of SEQ ID NO: 4961. In some embodiments, a 581-589 region of an AAV5 VP capsid polypeptide has a sequence of SEQ ID NO: 4952. In some embodiments, a 581-589 region of an AAV5 VP capsid polypeptide has a sequence of SEQ ID NO: 5075. In some embodiments, a 581-589 region of an AAV5 VP capsid polypeptide has a sequence of SEQ ID NO: 4354. In some embodiments, a 581-589 region of an AAV5 VP capsid polypeptide has a sequence of SEQ ID NO: 5060. In some embodiments, a 581-589 region of an AAV5 VP capsid polypeptide has a sequence of SEQ ID NO: 5138. In some embodiments, a 581-589 region of an AAV5 VP capsid polypeptide has a sequence of SEQ ID NO: 5206. In some embodiments, a 581-589 region of an AAV5 VP capsid polypeptide has a sequence of SEQ ID NO: 4288. In some embodiments, a 581-589 region of an AAV5 VP capsid polypeptide has a sequence of SEQ ID NO: 5092. In some embodiments, a 581-589 region of an AAV5 VP capsid polypeptide has a sequence of SEQ ID NO: 4059. In some embodiments, a 581-589 region of an AAV5 VP capsid polypeptide has a sequence of SEQ ID NO: 4295. In some embodiments, a 581-589 region of an AAV5 VP capsid polypeptide has a sequence of SEQ ID NO: 5030. In some embodiments, a 581-589 region of an AAV5 VP capsid polypeptide has a sequence of SEQ ID NO: 4938. In some embodiments, a 581-589 region of an AAV5 VP capsid polypeptide has a sequence of SEQ ID NO: 2661. In some embodiments, a 581-589 region of an AAV5 VP capsid polypeptide has a sequence of SEQ ID NO: 5215. In some embodiments, a 581-589 region of an AAV5 VP capsid polypeptide has a sequence of SEQ ID NO: 4960. In some embodiments, a 581-589 region of an AAV5 VP capsid polypeptide has a sequence of SEQ ID NO: 4969. In some embodiments, a 581-589 region of an AAV5 VP capsid polypeptide has a sequence of SEQ ID NO: 5023. In some embodiments, a 581-589 region of an AAV5 VP capsid polypeptide has a sequence that is at least 75%, at least 77.7%, at least 85%, at least 88.8% or 100% identical to SEQ ID NO: 4934.

[0220] In some embodiments, a 581-589 region of an AAV5 VP capsid polypeptide has a sequence of SEQ ID NO: 348 with 1 or 2 conservative substitutions. In some embodiments, a 581-589 region of an AAV5 VP capsid polypeptide has a sequence of SEQ ID NO: 2536 with 1 or 2 conservative substitutions. In some embodiments, a 581-589 region of an AAV5 VP capsid polypeptide has a sequence of SEQ ID NO: 5607 with 1 or 2 conservative substitutions. In some embodiments, a 581-589 region of an AAV5 VP capsid polypeptide has a sequence of SEQ ID NO: 1576 with 1 or 2 conservative substitutions. In some embodiments, a 581-589 region of an AAV5 VP capsid polypeptide has a sequence of SEQ ID NO: 4955 with 1 or 2 conservative substitutions. In some embodiments, a 581-589 region of an AAV5 VP capsid polypeptide has a sequence of SEQ ID NO: 5017 with 1 or 2 conservative substitutions. In some embodiments, a 581-589 region of an AAV5 VP capsid polypeptide has a sequence of SEQ ID NO: 4349 with 1 or 2 conservative substitutions. In some embodiments, a 581-589 region of an AAV5 VP capsid polypeptide has a sequence of SEQ ID NO: 4964 with 1 or 2 conservative substitutions. In some embodiments, a 581-589 region of an AAV5 VP capsid polypeptide has a sequence of SEQ ID NO: 293 with 1 or 2 conservative substitutions. In some embodiments, a 581-589 region of an AAV5 VP capsid polypeptide has a sequence of SEQ ID NO: 4314 with 1 or 2 conservative substitutions. In some embodiments, a 581-589 region of an AAV5 VP capsid polypeptide has a sequence of SEQ ID NO: 4995 with 1 or 2 conservative substitutions. In some embodiments, a 581-589 region of an AAV5 VP capsid polypeptide has a sequence of SEQ ID NO: 4366 with 1 or 2 conservative substitutions. In some embodiments, a 581-589 region of an AAV5 VP capsid polypeptide has a sequence of SEQ ID NO: 4961 with 1 or 2 conservative substitutions. In some embodiments, a 581-589 region of an AAV5 VP capsid polypeptide has a sequence of SEQ ID NO: 4952 with 1 or 2 conservative substitutions. In some embodiments, a 581-589 region of an AAV5 VP capsid polypeptide has a sequence of SEQ ID NO: 5075 with 1 or 2 conservative substitutions. In some embodiments, a 581-589 region of an AAV5 VP capsid polypeptide has a sequence of SEQ ID NO: 4354 with 1 or 2 conservative substitutions. In some embodiments, a 581-589 region of an AAV5 VP capsid polypeptide has a sequence of SEQ ID NO: 5060 with 1 or 2 conservative substitutions. In some embodiments, a 581-589 region of an AAV5 VP capsid polypeptide has a sequence of SEQ ID NO: 5138 with 1 or 2 conservative substitutions. In some embodiments, a 581-589 region of an AAV5 VP capsid polypeptide has a sequence of SEQ ID NO: 5206 with 1 or 2 conservative substitutions. In some embodiments, a 581-589 region of an AAV5 VP capsid polypeptide has a sequence of SEQ ID NO: 4288 with 1 or 2 conservative substitutions. In some embodiments, a 581-589 region of an AAV5 VP capsid polypeptide has a sequence of SEQ ID NO: 5092 with 1 or 2 conservative substitutions. In some embodiments, a 581-589 region of an AAV5 VP capsid polypeptide has a sequence of SEQ ID NO: 4059 with 1 or 2 conservative substitutions. In some embodiments, a 581-589 region of an AAV5 VP capsid polypeptide has a sequence of SEQ ID NO: 4295 with 1 or 2 conservative substitutions. In some embodiments, a 581-589 region of an AAV5 VP capsid polypeptide has a sequence of SEQ ID NO: 5030 with 1 or 2 conservative substitutions. In some embodiments, a 581-589 region of an AAV5 VP capsid polypeptide has a sequence of SEQ ID NO: 4938 with 1 or 2 conservative substitutions. In some embodiments, a 581-589 region of an AAV5 VP capsid polypeptide has a sequence of SEQ ID NO: 2661 with 1 or 2 conservative substitutions. In some embodiments, a 581-589 region of an AAV5 VP capsid polypeptide has a sequence of SEQ ID NO: 5215 with 1 or 2 conservative substitutions. In some embodiments, a 581-589 region of an AAV5 VP capsid polypeptide has a sequence of SEQ ID NO: 4960 with 1 or 2 conservative substitutions. In some embodiments, a 581-589 region of an AAV5 VP capsid polypeptide has a sequence of SEQ ID NO: 4969 with 1 or 2 conservative substitutions. In some embodiments, a 581-589 region of an AAV5 VP capsid polypeptide has a sequence of SEQ ID NO: 5023 with 1 or 2 conservative substitutions. In some embodiments, a 581-589 region of an AAV5 VP capsid polypeptide has a sequence of SEQ ID NO: 4934 with 1 or 2 conservative substitutions. The conservative substitutions may be at any position in the 581-589 region.

[0221] In some embodiments, an AAV VP capsid polypeptide preferentially targets a cardiac muscle tissue at a DNA enrichment of at least 25-fold greater than a wild type AAV9. For example, an AAV VP capsid polypeptide comprising a 581-589 region of SEQ ID NO: 348, SEQ ID NO: 2536, SEQ ID NO: 1576, SEQ ID NO: 4955, SEQ ID NO: 5017, SEQ ID NO: 4349, SEQ ID NO: 4964, SEQ ID NO: 293, SEQ ID NO: 4314, SEQ ID NO: 4995, SEQ ID NO: 4366, SEQ ID NO: 4961, SEQ ID NO: 4952, SEQ ID NO: 5075, SEQ ID NO: 4354, SEQ ID NO: 5060, SEQ ID NO: 5138, SEQ ID NO: 5206, SEQ ID NO: 4288, SEQ ID NO: 5092, SEQ ID NO: 4059, SEQ ID NO: 4295, SEQ ID NO: 5030, SEQ ID NO: 4938, SEQ ID NO: 2661, SEQ ID NO: 5215, SEQ ID NO: 4960, SEQ ID NO: 4969, SEQ ID NO: 5023, SEQ ID NO: 4934, SEQ ID NO: 4545, SEQ ID NO: 4963, SEQ ID NO: 4363, SEQ ID NO: 5159, or SEQ ID NO: 4973 may preferentially target a cardiac muscle tissue at a DNA enrichment of at least 25-fold greater than a wild type AAV9.

[0222] In some embodiments, an AAV VP capsid polypeptide preferentially targets a cardiac muscle tissue at a DNA enrichment of at least 30-fold greater than the wild type AAV9. For example, an AAV VP capsid polypeptide comprising a 581-589 region of SEQ ID NO: 348, SEQ ID NO: 2536, SEQ ID NO: 1576, SEQ ID NO: 4955, SEQ ID NO: 5017, SEQ ID NO: 4349, SEQ ID NO: 4964, SEQ ID NO: 293, SEQ ID NO: 4314, SEQ ID NO: 4995, or SEQ ID NO: 4366 may preferentially target a cardiac muscle tissue at a DNA enrichment of at least 30-fold greater than the wild type AAV9.

[0223] In some embodiments, an AAV VP capsid polypeptide preferentially targets a cardiac muscle tissue at a DNA enrichment of at least 50-fold greater than the wild type AAV9. For example, an AAV VP capsid polypeptide comprising a 581-589 region of SEQ ID NO: 348 or SEQ ID NO: 2536 may preferentially target a cardiac muscle tissue at a DNA enrichment of at least 50-fold greater than the wild type AAV9.

[0224] In some embodiments, an AAV VP capsid polypeptide preferentially targets a cardiac muscle tissue at an RNA enrichment of at least 10-fold greater than a wild type AAV9. For example, an AAV VP capsid polypeptide comprising a 581-589 region of SEQ ID NO: 348, SEQ ID NO: 5052, SEQ ID NO: 5193, SEQ ID NO: 5138, SEQ ID NO: 5163, SEQ ID NO: 4952, SEQ ID NO: 293, SEQ ID NO: 4317, SEQ ID NO: 5075, SEQ ID NO: 386, SEQ ID NO: 4288, SEQ ID NO: 4995, SEQ ID NO: 5030, SEQ ID NO: 4986, SEQ ID NO: 5206, SEQ ID NO: 4338, SEQ ID NO: 5159, SEQ ID NO: 4346, SEQ ID NO: 5060, SEQ ID NO: 4949, SEQ ID NO: 5017, SEQ ID NO: 5215, SEQ ID NO: 4314, SEQ ID NO: 5080, SEQ ID NO: 4964, SEQ ID NO: 4379, SEQ ID NO: 4304, SEQ ID NO: 18, SEQ ID NO: 4363, SEQ ID NO: 5027, SEQ ID NO: 4349, SEQ ID NO: 5208, or SEQ ID NO: 4938 may preferentially target a cardiac muscle tissue at an RNA enrichment of at least 10-fold greater than a wild type AAV9.

[0225] In some embodiments, an AAV VP capsid polypeptide preferentially targets a cardiac muscle tissue at an RNA enrichment of at least 20-fold or greater than the wild type AAV9. For example, an AAV VP capsid polypeptide comprising a 581-589 region of SEQ ID NO: 348, SEQ ID NO: 5052, SEQ ID NO: 5193, SEQ ID NO: 5138, or SEQ ID NO: 5163 may preferentially target a cardiac muscle tissue at an RNA enrichment of at least 20-fold or greater than the wild type AAV9.

[0226] In some embodiments, an AAV VP capsid polypeptide preferentially targets a cardiac muscle tissue at an RNA enrichment of at least 40-fold or greater than the wild type AAV9. For example, an AAV VP capsid polypeptide comprising a 581-589 region of SEQ ID NO: 348 may preferentially target a cardiac muscle tissue at an RNA enrichment of at least 40-fold or greater than the wild type AAV9.

[0227] In some embodiments, an AAV VP capsid polypeptide preferentially targets a cardiac muscle tissue at at a DNA enrichment of at least 5-fold greater than a wild type AAV5. For example, an AAV VP capsid polypeptide comprising a 581-589 region of SEQ ID NO: 348, SEQ ID NO: 2536, SEQ ID NO: 1576, SEQ ID NO: 4955, SEQ ID NO: 5017, SEQ ID NO: 4349, SEQ ID NO: 4964, SEQ ID NO: 293, SEQ ID NO: 4314, SEQ ID NO: 4995, SEQ ID NO: 4366, SEQ ID NO: 4961, SEQ ID NO: 4952, SEQ ID NO: 5075, SEQ ID NO: 4354, SEQ ID NO: 5060, SEQ ID NO: 5138, SEQ ID NO: 5206, SEQ ID NO: 4288, SEQ ID NO: 5092, SEQ ID NO: 4059, SEQ ID NO: 4295, SEQ ID NO: 5030, SEQ ID NO: 4938, SEQ ID NO: 2661, SEQ ID NO: 5215, SEQ ID NO: 4960, SEQ ID NO: 4969, SEQ ID NO: 5023, SEQ ID NO: 4934, SEQ ID NO: 4545, SEQ ID NO: 4963, SEQ ID NO: 4363, SEQ ID NO: 5159, or SEQ ID NO: 4973 may preferentially target a cardiac muscle tissue at a DNA enrichment of at least 5-fold greater than a wild type AAV5.

[0228] In some embodiments, an AAV VP capsid polypeptide preferentially targets a cardiac muscle tissue at a DNA enrichment of at least 10-fold greater than the wild type AAV5. For example, an AAV VP capsid polypeptide comprising a 581-589 region of SEQ ID NO: 348 or SEQ ID NO: 2536 may preferentially target a cardiac muscle tissue at a DNA enrichment of at least 10-fold greater than the wild type AAV5.

[0229] In some embodiments, an AAV VP capsid polypeptide preferentially targets a cardiac muscle tissue at an RNA enrichment of at least 5-fold greater than a wild type AAV5. For example, an AAV VP capsid polypeptide comprising a 581-589 region of SEQ ID NO: 348, SEQ ID NO: 5052, SEQ ID NO: 5193, SEQ ID NO: 5138, SEQ ID NO: 5163, SEQ ID NO: 4952, SEQ ID NO: 293, or SEQ ID NO: 4317 may preferentially target a cardiac muscle tissue at an RNA enrichment of at least 5-fold greater than a wild type AAV5.

[0230] In some embodiments, an AAV VP capsid polypeptide preferentially targets a cardiac muscle tissue at an RNA enrichment of at least 10-fold greater than the wild type AAV5. For example, an AAV VP capsid polypeptide comprising a 581-589 region of SEQ ID NO: 348 may preferentially target a cardiac muscle tissue at an RNA enrichment of at least 10-fold greater than the wild type AAV5.

[0231] In some embodiments, the engineered AAV VP capsid polypeptide comprises a polypeptide sequence represented by the formula: (A)-(X)—(B) wherein: (A) is the polypeptide sequence of SEQ ID NO: 5812 (VAYNVGGQMATNNQSSTTAP, corresponding to residues 561 to 580 of SEQ ID NO: 2); (X) is the 581-589 region having a polypeptide sequence selected from the list of polypeptides in TABLE 11 that is expected to confer skeletal muscle tissue tropism or preference on a recombinant AAV virion (rAAV), based on a secondary screen; and (B) is the polypeptide sequence of SEQ ID NO: 5813 (IVPGSVWMERDVYLQGPIWA, corresponding to residues 590 to 609 of SEQ ID NO: 2); and wherein the capsid polypeptide is capable of assembling into the rAAV and, the capsid does not have the sequence of any of SEQ ID NO: 1, SEQ ID NO: 3, SEQ ID NO: 4, SEQ ID NO: 5, SEQ ID NO: 6, SEQ ID NO: 7, or SEQ ID NO: 8. Also encompassed herein are rAAVs composed of engineered AAV5 VP2 capsid polypeptides and engineered AAV5 VP3 capsid polypeptides comprising a 581-589 region having a sequence selected from the list of polypeptides in TABLE 11 at the region corresponding to amino acid residues 445 to 453 in AAV5 VP2 or the region corresponding to amino acid residues 389 to 397 in AAV5 VP3.

[0232] In some embodiments, a 581-589 region of an AAV5 VP capsid polypeptide has a sequence that is at least 75%, at least 77.7%, at least 85%, at least 88.8%, or 100% identical to a sequence provided in TABLE 11. In some embodiments, a 581-589 region of an AAV5 VP capsid polypeptide has a sequence that is at least 75%, at least 77.7%, at least 85%, at least 88.8% or 100% identical to SEQ ID NO: 3472. In some embodiments, a 581-589 region of an AAV5 VP capsid polypeptide has a sequence that is at least 75%, at least 77.7%, at least 85%, at least 88.8% or 100% identical to SEQ ID NO: 3297. In some embodiments, a 581-589 region of an AAV5 VP capsid polypeptide has a sequence that is at least 75%, at least 77.7%, at least 85%, at least 88.8% or 100% identical to SEQ ID NO: 2661. In some embodiments, a 581-589 region of an AAV5 VP capsid polypeptide has a sequence that is at least 75%, at least 77.7%, at least 85%, at least 88.8% or 100% identical to SEQ ID NO: 4545. In some embodiments, a 581-589 region of an AAV5 VP capsid polypeptide has a sequence that is at least 75%, at least 77.7%, at least 85%, at least 88.8% or 100% identical to SEQ ID NO: 348. In some embodiments, a 581-589 region of an AAV5 VP capsid polypeptide has a sequence that is at least 75%, at least 77.7%, at least 85%, at least 88.8% or 100% identical to SEQ ID NO: 18. In some embodiments, a 581-589 region of an AAV5 VP capsid polypeptide has a sequence that is at least 75%, at least 77.7%, at least 85%, at least 88.8% or 100% identical to SEQ ID NO: 4349. In some embodiments, a 581-589 region of an AAV5 VP capsid polypeptide has a sequence that is at least 75%, at least 77.7%, at least 85%, at least 88.8% or 100% identical to SEQ ID NO: 293. In some embodiments, a 581-589 region of an AAV5 VP capsid polypeptide has a sequence that is at least 75%, at least 77.7%, at least 85%, at least 88.8% or 100% identical to SEQ ID NO: 5017. In some embodiments, a 581-589 region of an AAV5 VP capsid polypeptide has a sequence that is at least 75%, at least 77.7%, at least 85%, at least 88.8% or 100% identical to SEQ ID NO: 4955. In some embodiments, a 581-589 region of an AAV5 VP capsid polypeptide has a sequence that is at least 75%, at least 77.7%, at least 85%, at least 88.8% or 100% identical to SEQ ID NO: 4366. In some embodiments, a 581-589 region of an AAV5 VP capsid polypeptide has a sequence that is at least 75%, at least 77.7%, at least 85%, at least 88.8% or 100% identical to SEQ ID NO: 5092. In some embodiments, a 581-589 region of an AAV5 VP capsid polypeptide has a sequence that is at least 75%, at least 77.7%, at least 85%, at least 88.8% or 100% identical to SEQ ID NO: 210. In some embodiments, a 581-589 region of an AAV5 VP capsid polypeptide has a sequence that is at least 75%, at least 77.7%, at least 85%, at least 88.8% or 100% identical to SEQ ID NO: 4059. In some embodiments, a 581-589 region of an AAV5 VP capsid polypeptide has a sequence that is at least 75%, at least 77.7%, at least 85%, at least 88.8% or 100% identical to SEQ ID NO: 2536. In some embodiments, a 581-589 region of an AAV5 VP capsid polypeptide has a sequence that is at least 75%, at least 77.7%, at least 85%, at least 88.8% or 100% identical to SEQ ID NO: 5206. In some embodiments, a 581-589 region of an AAV5 VP capsid polypeptide has a sequence that is at least 75%, at least 77.7%, at least 85%, at least 88.8% or 100% identical to SEQ ID NO: 1971. In some embodiments, a 581-589 region of an AAV5 VP capsid polypeptide has a sequence that is at least 75%, at least 77.7%, at least 85%, at least 88.8% or 100% identical to SEQ ID NO: 262. In some embodiments, a 581-589 region of an AAV5 VP capsid polypeptide has a sequence that is at least 75%, at least 77.7%, at least 85%, at least 88.8% or 100% identical to SEQ ID NO: 4343. In some embodiments, a 581-589 region of an AAV5 VP capsid polypeptide has a sequence that is at least 75%, at least 77.7%, at least 85%, at least 88.8% or 100% identical to SEQ ID NO: 4995. In some embodiments, a 581-589 region of an AAV5 VP capsid polypeptide has a sequence that is at least 75%, at least 77.7%, at least 85%, at least 88.8% or 100% identical to SEQ ID NO: 4009. In some embodiments, a 581-589 region of an AAV5 VP capsid polypeptide has a sequence that is at least 75%, at least 77.7%, at least 85%, at least 88.8% or 100% identical to SEQ ID NO: 5190. In some embodiments, a 581-589 region of an AAV5 VP capsid polypeptide has a sequence that is at least 75%, at least 77.7%, at least 85%, at least 88.8% or 100% identical to SEQ ID NO: 724. In some embodiments, a 581-589 region of an AAV5 VP capsid polypeptide has a sequence that is at least 75%, at least 77.7%, at least 85%, at least 88.8% or 100% identical to SEQ ID NO: 4288. In some embodiments, a 581-589 region of an AAV5 VP capsid polypeptide has a sequence that is at least 75%, at least 77.7%, at least 85%, at least 88.8% or 100% identical to SEQ ID NO: 4973. In some embodiments, a 581-589 region of an AAV5 VP capsid polypeptide has a sequence that is at least 75%, at least 77.7%, at least 85%, at least 88.8% or 100% identical to SEQ ID NO: 4314. In some embodiments, a 581-589 region of an AAV5 VP capsid polypeptide has a sequence that is at least 75%, at least 77.7%, at least 85%, at least 88.8% or 100% identical to SEQ ID NO: 1561. In some embodiments, a 581-589 region of an AAV5 VP capsid polypeptide has a sequence that is at least 75%, at least 77.7%, at least 85%, at least 88.8% or 100% identical to SEQ ID NO: 5147. In some embodiments, a 581-589 region of an AAV5 VP capsid polypeptide has a sequence that is at least 75%, at least 77.7%, at least 85%, at least 88.8% or 100% identical to SEQ ID NO: 4238. In some embodiments, a 581-589 region of an AAV5 VP capsid polypeptide has a sequence that is at least 75%, at least 77.7%, at least 85%, at least 88.8% or 100% identical to SEQ ID NO: 4961.

[0233] In some embodiments, a 581-589 region of an AAV5 VP capsid polypeptide has a sequence of SEQ ID NO: 3472. In some embodiments, a 581-589 region of an AAV5 VP capsid polypeptide has a sequence of SEQ ID NO: 3297. In some embodiments, a 581-589 region of an AAV5 VP capsid polypeptide has a sequence of SEQ ID NO: 2661. In some embodiments, a 581-589 region of an AAV5 VP capsid polypeptide has a sequence of SEQ ID NO: 4545. In some embodiments, a 581-589 region of an AAV5 VP capsid polypeptide has a sequence of SEQ ID NO: 348. In some embodiments, a 581-589 region of an AAV5 VP capsid polypeptide has a sequence of SEQ ID NO: 18. In some embodiments, a 581-589 region of an AAV5 VP capsid polypeptide has a sequence of SEQ ID NO: 4349. In some embodiments, a 581-589 region of an AAV5 VP capsid polypeptide has a sequence of SEQ ID NO: 293. In some embodiments, a 581-589 region of an AAV5 VP capsid polypeptide has a sequence of SEQ ID NO: 5017. In some embodiments, a 581-589 region of an AAV5 VP capsid polypeptide has a sequence of SEQ ID NO: 4955. In some embodiments, a 581-589 region of an AAV5 VP capsid polypeptide has a sequence of SEQ ID NO: 4366. In some embodiments, a 581-589 region of an AAV5 VP capsid polypeptide has a sequence of SEQ ID NO: 5092. In some embodiments, a 581-589 region of an AAV5 VP capsid polypeptide has a sequence of SEQ ID NO: 210. In some embodiments, a 581-589 region of an AAV5 VP capsid polypeptide has a sequence of SEQ ID NO: 4059. In some embodiments, a 581-589 region of an AAV5 VP capsid polypeptide has a sequence of SEQ ID NO: 2536. In some embodiments, a 581-589 region of an AAV5 VP capsid polypeptide has a sequence of SEQ ID NO: 5206. In some embodiments, a 581-589 region of an AAV5 VP capsid polypeptide has a sequence of SEQ ID NO: 1971. In some embodiments, a 581-589 region of an AAV5 VP capsid polypeptide has a sequence of SEQ ID NO: 262. In some embodiments, a 581-589 region of an AAV5 VP capsid polypeptide has a sequence of SEQ ID NO: 4343. In some embodiments, a 581-589 region of an AAV5 VP capsid polypeptide has a sequence of SEQ ID NO: 4995. In some embodiments, a 581-589 region of an AAV5 VP capsid polypeptide has a sequence of SEQ ID NO: 4009. In some embodiments, a 581-589 region of an AAV5 VP capsid polypeptide has a sequence of SEQ ID NO: 5190. In some embodiments, a 581-589 region of an AAV5 VP capsid polypeptide has a sequence of SEQ ID NO: 724. In some embodiments, a 581-589 region of an AAV5 VP capsid polypeptide has a sequence of SEQ ID NO: 4288. In some embodiments, a 581-589 region of an AAV5 VP capsid polypeptide has a sequence of SEQ ID NO: 4973. In some embodiments, a 581-589 region of an AAV5 VP capsid polypeptide has a sequence of SEQ ID NO: 4314. In some embodiments, a 581-589 region of an AAV5 VP capsid polypeptide has a sequence of SEQ ID NO: 1561. In some embodiments, a 581-589 region of an AAV5 VP capsid polypeptide has a sequence of SEQ ID NO: 5147. In some embodiments, a 581-589 region of an AAV5 VP capsid polypeptide has a sequence of SEQ ID NO: 4238. In some embodiments, a 581-589 region of an AAV5 VP capsid polypeptide has a sequence of SEQ ID NO: 4961.

[0234] In some embodiments, a 581-589 region of an AAV5 VP capsid polypeptide has a sequence of SEQ ID NO: 3472 with 1 or 2 conservative substitutions. In some embodiments, a 581-589 region of an AAV5 VP capsid polypeptide has a sequence of SEQ ID NO: 3297 with 1 or 2 conservative substitutions. In some embodiments, a 581-589 region of an AAV5 VP capsid polypeptide has a sequence of SEQ ID NO: 2661 with 1 or 2 conservative substitutions. In some embodiments, a 581-589 region of an AAV5 VP capsid polypeptide has a sequence of SEQ ID NO: 4545 with 1 or 2 conservative substitutions. In some embodiments, a 581-589 region of an AAV5 VP capsid polypeptide has a sequence of SEQ ID NO: 348 with 1 or 2 conservative substitutions. In some embodiments, a 581-589 region of an AAV5 VP capsid polypeptide has a sequence of SEQ ID NO: 18 with 1 or 2 conservative substitutions. In some embodiments, a 581-589 region of an AAV5 VP capsid polypeptide has a sequence of SEQ ID NO: 4349 with 1 or 2 conservative substitutions. In some embodiments, a 581-589 region of an AAV5 VP capsid polypeptide has a sequence of SEQ ID NO: 293 with 1 or 2 conservative substitutions. In some embodiments, a 581-589 region of an AAV5 VP capsid polypeptide has a sequence of SEQ ID NO: 5017 with 1 or 2 conservative substitutions. In some embodiments, a 581-589 region of an AAV5 VP capsid polypeptide has a sequence of SEQ ID NO: 4955 with 1 or 2 conservative substitutions. In some embodiments, a 581-589 region of an AAV5 VP capsid polypeptide has a sequence of SEQ ID NO: 4366 with 1 or 2 conservative substitutions. In some embodiments, a 581-589 region of an AAV5 VP capsid polypeptide has a sequence of SEQ ID NO: 5092 with 1 or 2 conservative substitutions. In some embodiments, a 581-589 region of an AAV5 VP capsid polypeptide has a sequence of SEQ ID NO: 210 with 1 or 2 conservative substitutions. In some embodiments, a 581-589 region of an AAV5 VP capsid polypeptide has a sequence of SEQ ID NO: 4059 with 1 or 2 conservative substitutions. In some embodiments, a 581-589 region of an AAV5 VP capsid polypeptide has a sequence of SEQ ID NO: 2536 with 1 or 2 conservative substitutions. In some embodiments, a 581-589 region of an AAV5 VP capsid polypeptide has a sequence of SEQ ID NO: 5206 with 1 or 2 conservative substitutions. In some embodiments, a 581-589 region of an AAV5 VP capsid polypeptide has a sequence of SEQ ID NO: 1971 with 1 or 2 conservative substitutions. In some embodiments, a 581-589 region of an AAV5 VP capsid polypeptide has a sequence of SEQ ID NO: 262 with 1 or 2 conservative substitutions. In some embodiments, a 581-589 region of an AAV5 VP capsid polypeptide has a sequence of SEQ ID NO: 4343 with 1 or 2 conservative substitutions. In some embodiments, a 581-589 region of an AAV5 VP capsid polypeptide has a sequence of SEQ ID NO: 4995 with 1 or 2 conservative substitutions. In some embodiments, a 581-589 region of an AAV5 VP capsid polypeptide has a sequence of SEQ ID NO: 4009 with 1 or 2 conservative substitutions. In some embodiments, a 581-589 region of an AAV5 VP capsid polypeptide has a sequence of SEQ ID NO: 5190 with 1 or 2 conservative substitutions. In some embodiments, a 581-589 region of an AAV5 VP capsid polypeptide has a sequence of SEQ ID NO: 724 with 1 or 2 conservative substitutions. In some embodiments, a 581-589 region of an AAV5 VP capsid polypeptide has a sequence of SEQ ID NO: 4288 with 1 or 2 conservative substitutions. In some embodiments, a 581-589 region of an AAV5 VP capsid polypeptide has a sequence of SEQ ID NO: 4973 with 1 or 2 conservative substitutions. In some embodiments, a 581-589 region of an AAV5 VP capsid polypeptide has a sequence of SEQ ID NO: 4314 with 1 or 2 conservative substitutions. In some embodiments, a 581-589 region of an AAV5 VP capsid polypeptide has a sequence of SEQ ID NO: 1561 with 1 or 2 conservative substitutions. In some embodiments, a 581-589 region of an AAV5 VP capsid polypeptide has a sequence of SEQ ID NO: 5147 with 1 or 2 conservative substitutions. In some embodiments, a 581-589 region of an AAV5 VP capsid polypeptide has a sequence of SEQ ID NO: 4238 with 1 or 2 conservative substitutions. In some embodiments, a 581-589 region of an AAV5 VP capsid polypeptide has a sequence of SEQ ID NO: 4961 with 1 or 2 conservative substitutions. The conservative substitutions may be at any position in the 581-589 region.

[0235] In some embodiments, an AAV VP capsid polypeptide preferentially targets a skeletal muscle tissue at a DNA enrichment of at least 15-fold greater than a wild type AAV9. For example, an AAV VP capsid polypeptide comprising a 581-589 region of SEQ ID NO: 3472, SEQ ID NO: 3297, SEQ ID NO: 2661, SEQ ID NO: 4545, SEQ ID NO: 348, SEQ ID NO: 18, SEQ ID NO: 4349, SEQ ID NO: 293, SEQ ID NO: 5017, SEQ ID NO: 4955, SEQ ID NO: 4366, SEQ ID NO: 5092, SEQ ID NO: 210, SEQ ID NO: 4059, SEQ ID NO: 2536, SEQ ID NO: 5206, or SEQ ID NO: 1971 may preferentially target a skeletal muscle tissue at a DNA enrichment of at least 15-fold greater than a wild type AAV9.

[0236] In some embodiments, an AAV VP capsid polypeptide preferentially targets a skeletal muscle tissue at a DNA enrichment of at least 20-fold greater than the wild type AAV9. For example, an AAV VP capsid polypeptide comprising a 581-589 region of SEQ ID NO: 3472, SEQ ID NO: 3297, SEQ ID NO: 2661, SEQ ID NO: 4545, or SEQ ID NO: 348 may preferentially target a skeletal muscle tissue at a DNA enrichment of at least 20-fold greater than the wild type AAV9.

[0237] In some embodiments, an AAV VP capsid polypeptide preferentially targets a skeletal muscle tissue at a DNA enrichment of at least 30-fold greater than the wild type AAV9. For example, an AAV VP capsid polypeptide comprising a 581-589 region of SEQ ID NO: 3472 or SEQ ID NO: 3297 may preferentially target a skeletal muscle tissue at a DNA enrichment of at least 30-fold greater than the wild type AAV9.

[0238] In some embodiments, an AAV VP capsid polypeptide preferentially targets a skeletal muscle tissue at an RNA enrichment of at least 2-fold greater than a wild type AAV9. For example, an AAV VP capsid polypeptide comprising a 581-589 region of SEQ ID NO: 5138, SEQ ID NO: 3472, SEQ ID NO: 1934, SEQ ID NO: 3283, SEQ ID NO: 5817 (KTGTRDSAR), SEQ ID NO: 278, SEQ ID NO: 1634, SEQ ID NO: 1391, or SEQ ID NO: 1537 may preferentially target a skeletal muscle tissue at an RNA enrichment of at least 2-fold greater than a wild type AAV9.

[0239] In some embodiments, an AAV VP capsid polypeptide preferentially targets a skeletal muscle tissue at an RNA enrichment of at least 10-fold or greater than the wild type AAV9. For example, an AAV VP capsid polypeptide comprising a 581-589 region of SEQ ID NO: 5138, SEQ ID NO: 3472, SEQ ID NO: 1934, SEQ ID NO: 3283, SEQ ID NO: 5817, or SEQ ID NO: 278 may preferentially target a skeletal muscle tissue at an RNA enrichment of at least 10-fold or greater than the wild type AAV9.

[0240] In some embodiments, an AAV VP capsid polypeptide preferentially targets a skeletal muscle tissue at an RNA enrichment of at least 25-fold or greater than the wild type AAV9. For example, an AAV VP capsid polypeptide comprising a 581-589 region of SEQ ID NO: 5138, SEQ ID NO: 3472, SEQ ID NO: 1934, or SEQ ID NO: 3283 may preferentially target a skeletal muscle tissue at an RNA enrichment of at least 25-fold or greater than the wild type AAV9.

[0241] In some embodiments, an AAV VP capsid polypeptide preferentially targets a skeletal muscle tissue at a DNA enrichment of at least 4-fold greater than a wild type AAV5. For example, an AAV VP capsid polypeptide comprising a 581-589 region of SEQ ID NO: 3472, SEQ ID NO: 3297, SEQ ID NO: 2661, SEQ ID NO: 4545, SEQ ID NO: 348, SEQ ID NO: 18, SEQ ID NO: 4349, SEQ ID NO: 293, SEQ ID NO: 5017, SEQ ID NO: 4955, or SEQ ID NO: 4366 may preferentially target a skeletal muscle tissue at a DNA enrichment of at least 4-fold greater than a wild type AAV5.

[0242] In some embodiments, an AAV VP capsid polypeptide preferentially targets a skeletal muscle tissue at a DNA enrichment of at least 5-fold greater than the wild type AAV5. For example, an AAV VP capsid polypeptide comprising a 581-589 region of SEQ ID NO: 3472, SEQ ID NO: 3297, SEQ ID NO: 2661, SEQ ID NO: 4545, or SEQ ID NO: 348 may preferentially target a skeletal muscle tissue at a DNA enrichment of at least 5-fold greater than the wild type AAV5.

[0243] In some embodiments, an AAV VP capsid polypeptide preferentially targets a skeletal muscle tissue at an RNA enrichment of at least that of a wild type AAV5. For example, an AAV VP capsid polypeptide comprising a 581-589 region of SEQ ID NO: 5138, SEQ ID NO: 3472, SEQ ID NO: 1934, SEQ ID NO: 3283, SEQ ID NO: 5817, or SEQ ID NO: 278 may preferentially target a skeletal muscle tissue at an RNA enrichment of at least that of a wild type AAV5.

[0244] In some embodiments, an AAV VP capsid polypeptide preferentially targets a skeletal muscle tissue at an RNA enrichment of at least 3-fold greater than the wild type AAV5. For example, an AAV VP capsid polypeptide comprising a 581-589 region of SEQ ID NO: 5138, SEQ ID NO: 3472, SEQ ID NO: 1934, or SEQ ID NO: 3283 may preferentially target a skeletal muscle tissue at an RNA enrichment of at least 3-fold greater than the wild type AAV5.

[0245] In some embodiments, the engineered AAV VP capsid polypeptide comprises a polypeptide sequence represented by the formula: (A)-(X)—(B) wherein: (A) is the polypeptide sequence of SEQ ID NO: 5812 (VAYNVGGQMATNNQSSTTAP, corresponding to residues 561 to 580 of SEQ ID NO: 2); (X) is the 581-589 region having a polypeptide sequence selected from the list of polypeptides in TABLE 12 that is expected to confer muscle tissue tropism or preference on a recombinant AAV virion (rAAV), based on a secondary screen; and (B) is the polypeptide sequence of SEQ ID NO: 5813 (IVPGSVWMERDVYLQGPIWA, corresponding to residues 590 to 609 of SEQ ID NO: 2); and wherein the capsid polypeptide is capable of assembling into the rAAV and, the capsid does not have the sequence of any of SEQ ID NO: 1, SEQ ID NO: 3, SEQ ID NO: 4, SEQ ID NO: 5, SEQ ID NO: 6, SEQ ID NO: 7, or SEQ ID NO: 8. Also encompassed herein are rAAVs composed of engineered AAV5 VP2 capsid polypeptides and engineered AAV5 VP3 capsid polypeptides comprising a 581-589 region having a sequence selected from the list of polypeptides in TABLE 12 at the region corresponding to amino acid residues 445 to 453 in AAV5 VP2 or the region corresponding to amino acid residues 389 to 397 in AAV5 VP3.

[0246] In some embodiments, a 581-589 region of an AAV5 VP capsid polypeptide has a sequence that is at least 75%, at least 77.7%, at least 85%, at least 88.8%, or 100% identical to a sequence provided in TABLE 12. In some embodiments, a 581-589 region of an AAV5 VP capsid polypeptide has a sequence that is at least 75%, at least 77.7%, at least 85%, at least 88.8% or 100% identical to SEQ ID NO: 348. In some embodiments, a 581-589 region of an AAV5 VP capsid polypeptide has a sequence that is at least 75%, at least 77.7%, at least 85%, at least 88.8% or 100% identical to SEQ ID NO: 2536. In some embodiments, a 581-589 region of an AAV5 VP capsid polypeptide has a sequence that is at least 75%, at least 77.7%, at least 85%, at least 88.8% or 100% identical to SEQ ID NO: 4955. In some embodiments, a 581-589 region of an AAV5 VP capsid polypeptide has a sequence that is at least 75%, at least 77.7%, at least 85%, at least 88.8% or 100% identical to SEQ ID NO: 5017. In some embodiments, a 581-589 region of an AAV5 VP capsid polypeptide has a sequence that is at least 75%, at least 77.7%, at least 85%, at least 88.8% or 100% identical to SEQ ID NO: 4349. In some embodiments, a 581-589 region of an AAV5 VP capsid polypeptide has a sequence that is at least 75%, at least 77.7%, at least 85%, at least 88.8% or 100% identical to SEQ ID NO: 293. In some embodiments, a 581-589 region of an AAV5 VP capsid polypeptide has a sequence that is at least 75%, at least 77.7%, at least 85%, at least 88.8% or 100% identical to SEQ ID NO: 1576. In some embodiments, a 581-589 region of an AAV5 VP capsid polypeptide has a sequence that is at least 75%, at least 77.7%, at least 85%, at least 88.8% or 100% identical to SEQ ID NO: 2661. In some embodiments, a 581-589 region of an AAV5 VP capsid polypeptide has a sequence that is at least 75%, at least 77.7%, at least 85%, at least 88.8% or 100% identical to SEQ ID NO: 4964. In some embodiments, a 581-589 region of an AAV5 VP capsid polypeptide has a sequence that is at least 75%, at least 77.7%, at least 85%, at least 88.8% or 100% identical to SEQ ID NO: 4314. In some embodiments, a 581-589 region of an AAV5 VP capsid polypeptide has a sequence that is at least 75%, at least 77.7%, at least 85%, at least 88.8% or 100% identical to SEQ ID NO: 4995. In some embodiments, a 581-589 region of an AAV5 VP capsid polypeptide has a sequence that is at least 75%, at least 77.7%, at least 85%, at least 88.8% or 100% identical to SEQ ID NO: 4366. In some embodiments, a 581-589 region of an AAV5 VP capsid polypeptide has a sequence that is at least 75%, at least 77.7%, at least 85%, at least 88.8% or 100% identical to SEQ ID NO: 4545. In some embodiments, a 581-589 region of an AAV5 VP capsid polypeptide has a sequence that is at least 75%, at least 77.7%, at least 85%, at least 88.8% or 100% identical to SEQ ID NO: 4961. In some embodiments, a 581-589 region of an AAV5 VP capsid polypeptide has a sequence that is at least 75%, at least 77.7%, at least 85%, at least 88.8% or 100% identical to SEQ ID NO: 5206. In some embodiments, a 581-589 region of an AAV5 VP capsid polypeptide has a sequence that is at least 75%, at least 77.7%, at least 85%, at least 88.8% or 100% identical to SEQ ID NO: 5092. In some embodiments, a 581-589 region of an AAV5 VP capsid polypeptide has a sequence that is at least 75%, at least 77.7%, at least 85%, at least 88.8% or 100% identical to SEQ ID NO: 3472. In some embodiments, a 581-589 region of an AAV5 VP capsid polypeptide has a sequence that is at least 75%, at least 77.7%, at least 85%, at least 88.8% or 100% identical to SEQ ID NO: 5075. In some embodiments, a 581-589 region of an AAV5 VP capsid polypeptide has a sequence that is at least 75%, at least 77.7%, at least 85%, at least 88.8% or 100% identical to SEQ ID NO: 4059. In some embodiments, a 581-589 region of an AAV5 VP capsid polypeptide has a sequence that is at least 75%, at least 77.7%, at least 85%, at least 88.8% or 100% identical to SEQ ID NO: 4354. In some embodiments, a 581-589 region of an AAV5 VP capsid polypeptide has a sequence that is at least 75%, at least 77.7%, at least 85%, at least 88.8% or 100% identical to SEQ ID NO: 5060. In some embodiments, a 581-589 region of an AAV5 VP capsid polypeptide has a sequence that is at least 75%, at least 77.7%, at least 85%, at least 88.8% or 100% identical to SEQ ID NO: 4288. In some embodiments, a 581-589 region of an AAV5 VP capsid polypeptide has a sequence that is at least 75%, at least 77.7%, at least 85%, at least 88.8% or 100% identical to SEQ ID NO: 4952. In some embodiments, a 581-589 region of an AAV5 VP capsid polypeptide has a sequence that is at least 75%, at least 77.7%, at least 85%, at least 88.8% or 100% identical to SEQ ID NO: 5138. In some embodiments, a 581-589 region of an AAV5 VP capsid polypeptide has a sequence that is at least 75%, at least 77.7%, at least 85%, at least 88.8% or 100% identical to SEQ ID NO: 18. In some embodiments, a 581-589 region of an AAV5 VP capsid polypeptide has a sequence that is at least 75%, at least 77.7%, at least 85%, at least 88.8% or 100% identical to SEQ ID NO: 5030. In some embodiments, a 581-589 region of an AAV5 VP capsid polypeptide has a sequence that is at least 75%, at least 77.7%, at least 85%, at least 88.8% or 100% identical to SEQ ID NO: 3297. In some embodiments, a 581-589 region of an AAV5 VP capsid polypeptide has a sequence that is at least 75%, at least 77.7%, at least 85%, at least 88.8% or 100% identical to SEQ ID NO: 4295. In some embodiments, a 581-589 region of an AAV5 VP capsid polypeptide has a sequence that is at least 75%, at least 77.7%, at least 85%, at least 88.8% or 100% identical to SEQ ID NO: 4363. In some embodiments, a 581-589 region of an AAV5 VP capsid polypeptide has a sequence that is at least 75%, at least 77.7%, at least 85%, at least 88.8% or 100% identical to SEQ ID NO: 4963.

[0247] In some embodiments, a 581-589 region of an AAV5 VP capsid polypeptide has a sequence of SEQ ID NO: 348. In some embodiments, a 581-589 region of an AAV5 VP capsid polypeptide has a sequence of SEQ ID NO: 2536. In some embodiments, a 581-589 region of an AAV5 VP capsid polypeptide has a sequence of SEQ ID NO: 4955. In some embodiments, a 581-589 region of an AAV5 VP capsid polypeptide has a sequence of SEQ ID NO: 5017. In some embodiments, a 581-589 region of an AAV5 VP capsid polypeptide has a sequence of SEQ ID NO: 4349. In some embodiments, a 581-589 region of an AAV5 VP capsid polypeptide has a sequence of SEQ ID NO: 293. In some embodiments, a 581-589 region of an AAV5 VP capsid polypeptide has a sequence of SEQ ID NO: 1576. In some embodiments, a 581-589 region of an AAV5 VP capsid polypeptide has a sequence of SEQ ID NO: 2661. In some embodiments, a 581-589 region of an AAV5 VP capsid polypeptide has a sequence of SEQ ID NO: 4964. In some embodiments, a 581-589 region of an AAV5 VP capsid polypeptide has a sequence of SEQ ID NO: 4314. In some embodiments, a 581-589 region of an AAV5 VP capsid polypeptide has a sequence of SEQ ID NO: 4995. In some embodiments, a 581-589 region of an AAV5 VP capsid polypeptide has a sequence of SEQ ID NO: 4366. In some embodiments, a 581-589 region of an AAV5 VP capsid polypeptide has a sequence of SEQ ID NO: 4545. In some embodiments, a 581-589 region of an AAV5 VP capsid polypeptide has a sequence of SEQ ID NO: 4961. In some embodiments, a 581-589 region of an AAV5 VP capsid polypeptide has a sequence of SEQ ID NO: 5206. In some embodiments, a 581-589 region of an AAV5 VP capsid polypeptide has a sequence of SEQ ID NO: 5092. In some embodiments, a 581-589 region of an AAV5 VP capsid polypeptide has a sequence of SEQ ID NO: 3472. In some embodiments, a 581-589 region of an AAV5 VP capsid polypeptide has a sequence of SEQ ID NO: 5075. In some embodiments, a 581-589 region of an AAV5 VP capsid polypeptide has a sequence of SEQ ID NO: 4059. In some embodiments, a 581-589 region of an AAV5 VP capsid polypeptide has a sequence of SEQ ID NO: 4354. In some embodiments, a 581-589 region of an AAV5 VP capsid polypeptide has a sequence of SEQ ID NO: 5060. In some embodiments, a 581-589 region of an AAV5 VP capsid polypeptide has a sequence of SEQ ID NO: 4288. In some embodiments, a 581-589 region of an AAV5 VP capsid polypeptide has a sequence of SEQ ID NO: 4952. In some embodiments, a 581-589 region of an AAV5 VP capsid polypeptide has a sequence of SEQ ID NO: 5138. In some embodiments, a 581-589 region of an AAV5 VP capsid polypeptide has a sequence of SEQ ID NO: 18. In some embodiments, a 581-589 region of an AAV5 VP capsid polypeptide has a sequence of SEQ ID NO: 5030. In some embodiments, a 581-589 region of an AAV5 VP capsid polypeptide has a sequence of SEQ ID NO: 3297. In some embodiments, a 581-589 region of an AAV5 VP capsid polypeptide has a sequence of SEQ ID NO: 4295. In some embodiments, a 581-589 region of an AAV5 VP capsid polypeptide has a sequence of SEQ ID NO: 4363. In some embodiments, a 581-589 region of an AAV5 VP capsid polypeptide has a sequence of SEQ ID NO: 4963.

[0248] In some embodiments, a 581-589 region of an AAV5 VP capsid polypeptide has a sequence of SEQ ID NO: 348 with 1 or 2 conservative substitutions. In some embodiments, a 581-589 region of an AAV5 VP capsid polypeptide has a sequence of SEQ ID NO: 2536 with 1 or 2 conservative substitutions. In some embodiments, a 581-589 region of an AAV5 VP capsid polypeptide has a sequence of SEQ ID NO: 4955 with 1 or 2 conservative substitutions. In some embodiments, a 581-589 region of an AAV5 VP capsid polypeptide has a sequence of SEQ ID NO: 5017 with 1 or 2 conservative substitutions. In some embodiments, a 581-589 region of an AAV5 VP capsid polypeptide has a sequence of SEQ ID NO: 4349 with 1 or 2 conservative substitutions. In some embodiments, a 581-589 region of an AAV5 VP capsid polypeptide has a sequence of SEQ ID NO: 293 with 1 or 2 conservative substitutions. In some embodiments, a 581-589 region of an AAV5 VP capsid polypeptide has a sequence of SEQ ID NO: 1576 with 1 or 2 conservative substitutions. In some embodiments, a 581-589 region of an AAV5 VP capsid polypeptide has a sequence of SEQ ID NO: 2661 with 1 or 2 conservative substitutions. In some embodiments, a 581-589 region of an AAV5 VP capsid polypeptide has a sequence of SEQ ID NO: 4964 with 1 or 2 conservative substitutions. In some embodiments, a 581-589 region of an AAV5 VP capsid polypeptide has a sequence of SEQ ID NO: 4314 with 1 or 2 conservative substitutions. In some embodiments, a 581-589 region of an AAV5 VP capsid polypeptide has a sequence of SEQ ID NO: 4995 with 1 or 2 conservative substitutions. In some embodiments, a 581-589 region of an AAV5 VP capsid polypeptide has a sequence of SEQ ID NO: 4366 with 1 or 2 conservative substitutions. In some embodiments, a 581-589 region of an AAV5 VP capsid polypeptide has a sequence of SEQ ID NO: 4545 with 1 or 2 conservative substitutions. In some embodiments, a 581-589 region of an AAV5 VP capsid polypeptide has a sequence of SEQ ID NO: 4961 with 1 or 2 conservative substitutions. In some embodiments, a 581-589 region of an AAV5 VP capsid polypeptide has a sequence of SEQ ID NO: 5206 with 1 or 2 conservative substitutions. In some embodiments, a 581-589 region of an AAV5 VP capsid polypeptide has a sequence of SEQ ID NO: 5092 with 1 or 2 conservative substitutions. In some embodiments, a 581-589 region of an AAV5 VP capsid polypeptide has a sequence of SEQ ID NO: 3472 with 1 or 2 conservative substitutions. In some embodiments, a 581-589 region of an AAV5 VP capsid polypeptide has a sequence of SEQ ID NO: 5075 with 1 or 2 conservative substitutions. In some embodiments, a 581-589 region of an AAV5 VP capsid polypeptide has a sequence of SEQ ID NO: 4059 with 1 or 2 conservative substitutions. In some embodiments, a 581-589 region of an AAV5 VP capsid polypeptide has a sequence of SEQ ID NO: 4354 with 1 or 2 conservative substitutions. In some embodiments, a 581-589 region of an AAV5 VP capsid polypeptide has a sequence of SEQ ID NO: 5060 with 1 or 2 conservative substitutions. In some embodiments, a 581-589 region of an AAV5 VP capsid polypeptide has a sequence of SEQ ID NO: 4288 with 1 or 2 conservative substitutions. In some embodiments, a 581-589 region of an AAV5 VP capsid polypeptide has a sequence of SEQ ID NO: 4952 with 1 or 2 conservative substitutions. In some embodiments, a 581-589 region of an AAV5 VP capsid polypeptide has a sequence of SEQ ID NO: 5138 with 1 or 2 conservative substitutions. In some embodiments, a 581-589 region of an AAV5 VP capsid polypeptide has a sequence of SEQ ID NO: 18 with 1 or 2 conservative substitutions. In some embodiments, a 581-589 region of an AAV5 VP capsid polypeptide has a sequence of SEQ ID NO: 5030 with 1 or 2 conservative substitutions. In some embodiments, a 581-589 region of an AAV5 VP capsid polypeptide has a sequence of SEQ ID NO: 3297 with 1 or 2 conservative substitutions. In some embodiments, a 581-589 region of an AAV5 VP capsid polypeptide has a sequence of SEQ ID NO: 4295 with 1 or 2 conservative substitutions. In some embodiments, a 581-589 region of an AAV5 VP capsid polypeptide has a sequence of SEQ ID NO: 4363 with 1 or 2 conservative substitutions. In some embodiments, a 581-589 region of an AAV5 VP capsid polypeptide has a sequence of SEQ ID NO: 4963 with 1 or 2 conservative substitutions. The conservative substitutions may be at any position in the 581-589 region.

[0249] In some embodiments, an AAV VP capsid polypeptide preferentially targets a muscle tissue at a DNA enrichment of at least 20-fold greater than a wild type AAV9. For example, an AAV VP capsid polypeptide comprising a 581-589 region of SEQ ID NO: 348, SEQ ID NO: 2536, SEQ ID NO: 4955, SEQ ID NO: 5017, SEQ ID NO: 4349, SEQ ID NO: 293, SEQ ID NO: 1576, SEQ ID NO: 2661, SEQ ID NO: 4964, SEQ ID NO: 4314, SEQ ID NO: 4995, SEQ ID NO: 4366, SEQ ID NO: 4545, SEQ ID NO: 4961, SEQ ID NO: 5206, SEQ ID NO: 5092, SEQ ID NO: 3472, SEQ ID NO: 5075, SEQ ID NO: 4059, SEQ ID NO: 4354, SEQ ID NO: 5060, SEQ ID NO: 4288, SEQ ID NO: 4952, SEQ ID NO: 5138, SEQ ID NO: 18, SEQ ID NO: 5030, SEQ ID NO: 3297, SEQ ID NO: 4295, SEQ ID NO: 4363, SEQ ID NO: 4963, SEQ ID NO: 4973, SEQ ID NO: 5159, SEQ ID NO: 4960, SEQ ID NO: 4938, SEQ ID NO: 5157, SEQ ID NO: 5023, or SEQ ID NO: 4969 may preferentially target a muscle tissue at a DNA enrichment of at least 20-fold greater than a wild type AAV9.

[0250] In some embodiments, an AAV VP capsid polypeptide preferentially targets a muscle tissue at a DNA enrichment of at least 25-fold greater than the wild type AAV9. For example, an AAV VP capsid polypeptide comprising a 581-589 region of SEQ ID NO: 348, SEQ ID NO: 2536, SEQ ID NO: 4955, SEQ ID NO: 5017, SEQ ID NO: 4349, SEQ ID NO: 293, SEQ ID NO: 1576, SEQ ID NO: 2661, SEQ ID NO: 4964, SEQ ID NO: 4314, SEQ ID NO: 4995, or SEQ ID NO: 4366 may preferentially target a muscle tissue at a DNA enrichment of at least 25-fold greater than the wild type AAV9.

[0251] In some embodiments, an AAV VP capsid polypeptide preferentially targets a muscle tissue at a DNA enrichment of at least 30-fold greater than the wild type AAV9. For example, an AAV VP capsid polypeptide comprising a 581-589 region of SEQ ID NO: 348 or SEQ ID NO: 2536 may preferentially target a muscle tissue at a DNA enrichment of at least 30-fold greater than the wild type AAV9.

[0252] In some embodiments, an AAV VP capsid polypeptide preferentially targets a muscle tissue at an RNA enrichment of at least 5-fold greater than a wild type AAV9. For example, an AAV VP capsid polypeptide comprising a 581-589 region of SEQ ID NO: 5138, SEQ ID NO: 3472, SEQ ID NO: 348, SEQ ID NO: 5052, SEQ ID NO: 5193, SEQ ID NO: 5026, SEQ ID NO: 278, SEQ ID NO: 5163, SEQ ID NO: 293, SEQ ID NO: 4943, SEQ ID NO: 4952, SEQ ID NO: 4317, SEQ ID NO: 5075, SEQ ID NO: 386, SEQ ID NO: 4986, SEQ ID NO: 4995, SEQ ID NO: 4288, SEQ ID NO: 5030, SEQ ID NO: 5206, SEQ ID NO: 5159, SEQ ID NO: 4949, SEQ ID NO: 4338, SEQ ID NO: 5060, SEQ ID NO: 4346, SEQ ID NO: 5215, SEQ ID NO: 5017, SEQ ID NO: 4314, SEQ ID NO: 5080, SEQ ID NO: 4964, SEQ ID NO: 4363, SEQ ID NO: 4379, SEQ ID NO: 5027, SEQ ID NO: 4304, SEQ ID NO: 18, SEQ ID NO: 4349, SEQ ID NO: 4938, or SEQ ID NO: 2536 may preferentially target a muscle tissue at an RNA enrichment of at least 5-fold greater than a wild type AAV9.

[0253] In some embodiments, an AAV VP capsid polypeptide preferentially targets a muscle tissue at an RNA enrichment of at least 10-fold or greater than the wild type AAV9. For example, an AAV VP capsid polypeptide comprising a 581-589 region of SEQ ID NO: 5138, SEQ ID NO: 3472, SEQ ID NO: 348, SEQ ID NO: 5052, SEQ ID NO: 5193, SEQ ID NO: 5026, SEQ ID NO: 278, or SEQ ID NO: 5163 may preferentially target a muscle tissue at an RNA enrichment of at least 10-fold or greater than the wild type AAV9.

[0254] In some embodiments, an AAV VP capsid polypeptide preferentially targets a muscle tissue at an RNA enrichment of at least 100-fold or greater than the wild type AAV9. For example, an AAV VP capsid polypeptide comprising a 581-589 region of SEQ ID NO: 5138 may preferentially target a muscle tissue at an RNA enrichment of at least 100-fold or greater than the wild type AAV9.

[0255] In some embodiments, an AAV VP capsid polypeptide preferentially targets a muscle tissue at a DNA enrichment of at least 5-fold greater than a wild type AAV5. For example, an AAV VP capsid polypeptide comprising a 581-589 region of SEQ ID NO: 348, SEQ ID NO: 2536, SEQ ID NO: 4955, SEQ ID NO: 5017, SEQ ID NO: 4349, SEQ ID NO: 293, SEQ ID NO: 1576, SEQ ID NO: 2661, SEQ ID NO: 4964, SEQ ID NO: 4314, SEQ ID NO: 4995, SEQ ID NO: 4366, SEQ ID NO: 4545, SEQ ID NO: 4961, SEQ ID NO: 5206, SEQ ID NO: 5092, SEQ ID NO: 3472, SEQ ID NO: 5075, SEQ ID NO: 4059, SEQ ID NO: 4354, or SEQ ID NO: 5060 may preferentially target a muscle tissue at a DNA enrichment of at least 5-fold greater than a wild type AAV5.

[0256] In some embodiments, an AAV VP capsid polypeptide preferentially targets a muscle tissue at a DNA enrichment of at least 10-fold greater than the wild type AAV5. For example, an AAV VP capsid polypeptide comprising a 581-589 region of SEQ ID NO: 348 may preferentially target a muscle tissue at a DNA enrichment of at least 10-fold greater than the wild type AAV5.

[0257] In some embodiments, an AAV VP capsid polypeptide preferentially targets a muscle tissue at an RNA enrichment of at least that of a wild type AAV5. For example, an AAV VP capsid polypeptide comprising a 581-589 region of SEQ ID NO: 5138, SEQ ID NO: 3472, SEQ ID NO: 348, SEQ ID NO: 5052, SEQ ID NO: 5193, SEQ ID NO: 5026, SEQ ID NO: 278, SEQ ID NO: 5163, SEQ ID NO: 293, SEQ ID NO: 4943, SEQ ID NO: 4952, SEQ ID NO: 4317, SEQ ID NO: 5075, SEQ ID NO: 386, SEQ ID NO: 4986, or SEQ ID NO: 4995 may preferentially target a muscle tissue at an RNA enrichment of at least that of a wild type AAV5.

[0258] In some embodiments, an AAV VP capsid polypeptide preferentially targets a muscle tissue at an RNA enrichment of at least 2-fold greater than the wild type AAV5. For example, an AAV VP capsid polypeptide comprising a 581-589 region of SEQ ID NO: 5138, SEQ ID NO: 3472, SEQ ID NO: 348, and SEQ ID NO: 5052 may preferentially target a muscle tissue at an RNA enrichment of at least 2-fold greater than the wild type AAV5.

[0259] In some embodiments, the engineered AAV VP capsid polypeptide comprises a polypeptide sequence represented by the formula: (A)-(X)—(B) wherein: (A) is the polypeptide sequence of SEQ ID NO: 5812 (VAYNVGGQMATNNQSSTTAP, corresponding to residues 561 to 580 of SEQ ID NO: 2); (X) is the 581-589 region having a polypeptide sequence selected from the list of polypeptides in TABLE 5 (SEQ ID NO: 4238-SEQ ID NO: 4933) that is expected to confer muscle tissue tropism or preference on a recombinant AAV virion (rAAV), based on a primary screen; and (B) is the polypeptide sequence of SEQ ID NO: 5813 (IVPGSVWMERDVYLQGPIWA, corresponding to residues 590 to 609 of SEQ ID NO: 2); and wherein the capsid polypeptide is capable of assembling into the rAAV and, the capsid does not have the sequence of any of SEQ ID NO: 1, SEQ ID NO: 3, SEQ ID NO: 4, SEQ ID NO: 5, SEQ ID NO: 6, SEQ ID NO: 7, or SEQ ID NO: 8. Also encompassed herein are rAAVs composed of engineered AAV5 VP2 capsid polypeptides and engineered AAV5 VP3 capsid polypeptides comprising a 581-589 region having a sequence selected from the list of polypeptides in TABLE 5 (SEQ ID NO: 4238-SEQ ID NO: 4933) at the region corresponding to amino acid residues 445 to 453 in AAV5 VP2 or the region corresponding to amino acid residues 389 to 397 in AAV5 VP3.

TABLE 5
Sequences of 581-589 Regions for Muscle
Tropism

| SEQ ID | |
|---|---|
| NO | Sequence |
| 4238 | AACFKQLMQ |
| 4239 | AACQWQSQR |
| 4240 | AACSFAIQR |
| 4241 | AADKPAHNP |
| 4242 | AAIQAMACG |
| 4243 | AALSINDQP |
| 4244 | AAMPHQKRE |
| 4245 | AAQYVMSLA |
| 4246 | AAREGVKLE |
| 4247 | ACATYQMTW |
| 4248 | ADCSIIYPE |
| 4249 | ADPRPAKGS |
| 4250 | AFQRTYQFH |
| 4251 | AGPFMVGFW |
| 4252 | AGTWENMSG |
| 4253 | AHILMGHNP |
| 4254 | AHLWYHQCA |
| 4255 | AIEQGLTMA |
| 4256 | AIFCAHYSY |
| 4257 | AKMYWDGHT |
| 4258 | AMFPQLWAQ |
| 4259 | AMNPKQMCF |
| 4260 | ANIPQTAWN |
| 4261 | APYCPTYIS |
| 4262 | AQGCMHRWQ |
| 4263 | AQIMLPSSK |
| 4264 | AQSTARHIE |
| 4265 | AQTEFGFME |
| 4266 | ARCLSVIEQ |
| 4267 | ARQLESFWT |
| 4268 | ASFYQLLIP |
| 4269 | ASIVLRDSF |
| 4270 | ASNPLNCPN |
| 4271 | ASRFEDLWE |
| 4272 | ASTEWDMHN |
| 4273 | ASVELMKVC |
| 4274 | ASYLWCTMP |
| 4275 | ATDRIRTMM |
| 4276 | ATELGKDSG |
| 4277 | ATGRAAYHE |
| 4278 | ATIWPVESW |
| 4279 | ATLCTQRGS |
| 4280 | ATLFYNAFW |
| 4281 | ATTAVGDAL |
| 4282 | ATWISHNAS |
| 4283 | AVALSFVSS |
| 4284 | AVCEYLRMD |
| 4285 | AVTQWMLYA |
| 4286 | AYPERLYSD |
| 4287 | AYRQMCIER |
| 4288 | CACKVSMSG |
| 4289 | CACSIGHHR |
| 4290 | CAFQMYDSP |
| 4291 | CAKQYDKGI |
| 4292 | CAMLLQAVQ |
| 4293 | CAQPQHNWC |
| 4294 | CATFVNKLS |
| 4295 | CAVKFHAYD |
| 4296 | CDGELGRKC |
| 4297 | CDGRGIPGC |
| 4298 | CDGSCKYYQ |
| 4299 | CDWMMANLG |
| 4300 | CEPEGWIRA |
| 4301 | CEPFNINWW |
| 4302 | CESHEYRGH |
| 4303 | CFMPMMYYE |
| 4304 | CFRLHEMHQ |
| 4305 | CFRNILDDS |
| 4306 | CGRCNWRGY |
| 4307 | CHGYTWERP |
| 4308 | CHWFRCSCA |
| 4309 | CIAFVKQCC |
| 4310 | CIARTDYQP |
| 4311 | CIGKWPISR |
| 4312 | CIHRLIEDN |
| 4313 | CIMSMMWSQ |
| 4314 | CIMYRSEAS |
| 4315 | CIQATKAYC |
| 4316 | CIRHAQDCY |
| 4317 | CITHQQMAV |
| 4318 | CKEWYVRDR |
| 4319 | CKPANWVRY |
| 4320 | CKTHIWGFP |
| 4321 | CKVIVNIGA |
| 4322 | CKWIPWQCD |
| 4323 | CKWPCTWNS |
| 4324 | CKYCCDSHE |
| 4325 | CLMEKISDF |
| 4326 | CLPFFINRW |
| 4327 | CMESYSISE |
| 4328 | CMINLFDAC |
| 4329 | CMNESGQFH |
| 4330 | CMQRPHTAP |
| 4331 | CMSQFHLER |
| 4332 | CNETPWHKG |
| 4333 | CPAILNVAC |
| 4334 | CPKWSNHDQ |
| 4335 | CPMKHIQDR |
| 4336 | CPQQDDWPG |
| 4337 | CPWFGFLGW |
| 4338 | CQATFSRAY |
| 4339 | CQCNWWGRP |
| 4340 | CQQRYGHGK |
| 4341 | CRCPLSIMS |
| 4342 | CSDLWRIPF |
| 4343 | CSHKKEQYD |
| 4344 | CSICHYDHA |
| 4345 | CSIYQQMFQ |
| 4346 | CSMSTQRGA |
| 4347 | CSSLFMFNT |
| 4348 | CSSNWPMGI |
| 4349 | CSSYLVTAN |
| 4350 | CSTARGYDL |
| 4351 | CSTESSNSM |
| 4352 | CSTTYGRKE |
| 4353 | CSWYTHAGA |
| 4354 | CTFMVYSQG |
| 4355 | CTFQSTSAW |
| 4356 | CTKTFDRTE |
| 4357 | CTNIQSVFH |
| 4358 | CTPTQWGSA |
| 4359 | CVATKSRML |
| 4360 | CVAVPLSMS |
| 4361 | CVGFWTQMN |
| 4362 | CVGTVFHTA |
| 4363 | CVHIKVDGT |
| 4364 | CVHVKEQSQ |
| 4365 | CVIYNDMQI |
| 4366 | CVLFRHVDQ |
| 4367 | CVMPLGMAA |
| 4368 | CVNMKYVDS |
| 4369 | CVQSEWGSK |
| 4370 | CVQWQMNDA |
| 4371 | CVSLHSISM |
| 4372 | CVYQFDFTQ |
| 4373 | CWELLTWQW |
| 4374 | CWFDFMITE |
| 4375 | CWGYTPDWN |
| 4376 | CYAPKFIGD |
| 4377 | CYIDYRMSY |
| 4378 | CYLEIPNNF |
| 4379 | CYNLFNSMY |
| 4380 | CYSLRPDGP |
| 4381 | DAKAHIFSF |
| 4382 | DASECKWYN |
| 4383 | DDLIPINPW |
| 4384 | DDVAEKQCC |
| 4385 | DEHTIDVMQ |
| 4386 | DENGTWPHG |
| 4387 | DEPENMYSS |
| 4388 | DFFWPRPKA |
| 4389 | DFPRPENHW |
| 4390 | DHECVHGSG |
| 4391 | DHELKGACS |
| 4392 | DHLWFSSPG |
| 4393 | DHNPIMMWC |
| 4394 | DHVECWPQG |
| 4395 | DIYPWVCYY |
| 4396 | DKCHWASEG |
| 4397 | DLGNDRWRF |
| 4398 | DMHSYNNAK |
| 4399 | DMKGRQDGA |
| 4400 | DQSPLRTQS |
| 4401 | DRMMYARNG |
| 4402 | DRNQLYSSF |
| 4403 | DSACAGWGL |
| 4404 | DSDYVLVDY |
| 4405 | DSIAKGVAH |
| 4406 | DSPFGWFNC |
| 4407 | DSPWSKWQP |
| 4408 | DTKDYPKQS |
| 4409 | DTKPVEEVK |
| 4410 | DTLHKLSDC |
| 4411 | DTRCYGEMF |
| 4412 | DTVQMLCQY |
| 4413 | DVHCICRYD |
| 4414 | DVHKWSCAK |
| 4415 | DVICRHHGM |
| 4416 | DVILSQEYN |
| 4417 | DVLKVRIQE |
| 4418 | DVRIPCCQH |
| 4419 | DVTMYAAWS |
| 4420 | DVVLCNQWR |
| 4421 | DVWNDLNSM |
| 4422 | DWKLTYPQG |
| 4423 | DWMVVRKEG |
| 4424 | DWPHIMFNY |
| 4425 | DYTFKRYVC |
| 4426 | EAEQCMIGQ |
| 4427 | EAGWFNHST |
| 4428 | EAHDLAGNM |
| 4429 | EAHKMISTR |
| 4430 | EAKASAHTC |
| 4431 | EAQLYPDML |
| 4432 | EASCMSIWT |
| 4433 | ECGHIFYPA |
| 4434 | ECIDVMQNR |
| 4435 | ECQLVKTVP |
| 4436 | ECTVICSSS |
| 4437 | ECVGGNIWG |
| 4438 | EERKCNLGC |
| 4439 | EFRNYWSPY |
| 4440 | EFWSVKNHD |
| 4441 | EHHICSKSA |
| 4442 | EHMKLFLSE |
| 4443 | EIATHITFQ |
| 4444 | EIGMVMDMN |
| 4445 | EIMALDSPC |
| 4446 | EKEWGTPMW |
| 4447 | EKFPPHGDV |
| 4448 | ELKWQVAQF |
| 4449 | EMGPYPYPS |
| 4450 | EMKIDEHWP |
| 4451 | EMLLQPMYG |
| 4452 | ENCVISVHH |
| 4453 | ENGFIHKQS |
| 4454 | ENQPYWQVY |
| 4455 | EPEGIYQPM |
| 4456 | EQDDYMIPP |
| 4457 | EQESWEMGP |
| 4458 | ESESANHEG |
| 4459 | ESFAKHDQN |
| 4460 | ESGSQSGQA |
| 4461 | ESSQVNWHR |
| 4462 | ESTGESTLG |
| 4463 | ETQPHADYE |
| 4464 | ETTKWEAQH |
| 4465 | EVGCSWMWG |
| 4466 | EVGNYPRIP |
| 4467 | EVGRQQWMD |
| 4468 | EVKADIAQM |
| 4469 | EVKSANATW |
| 4470 | EVPAQTMQS |
| 4471 | EVQKRLVAE |
| 4472 | EVTCESKIE |
| 4473 | FCDLAHHYE |
| 4474 | FCRDFVKDM |
| 4475 | FDKWPKPQC |
| 4476 | FDPADVQKW |
| 4477 | FFESWQYPY |
| 4478 | FHWREPYVE |
| 4479 | FKRHEIPEY |
| 4480 | FMWITISNY |
| 4481 | FRQPYVWDK |
| 4482 | FSCSLYRHG |
| 4483 | FTTSQTLAE |
| 4484 | FVGSRNCID |
| 4485 | FYFQNIHPW |
| 4486 | GCYQSNVIP |
| 4487 | GDCPYSMQP |
| 4488 | GDGHGMWKM |
| 4489 | GDPKSKHDC |
| 4490 | GEHHCKFPM |
| 4491 | GEKWELYPM |
| 4492 | GEPRPNYVD |
| 4493 | GFEFMLNCP |
| 4494 | GGDRWLGYW |
| 4495 | GGEDEKPGC |
| 4496 | GGHFGHITW |
| 4497 | GHDFTNQDR |
| 4498 | GHFLDRWRD |
| 4499 | GKFCMPRNY |
| 4500 | GKKCGWPND |
| 4501 | GKSDMDCVE |
| 4502 | GKWQQQMVL |
| 4503 | GNPNCCLTG |
| 4504 | GPCCKWCTE |
| 4505 | GQNHVIVGA |
| 4506 | GRADCSAHP |
| 4507 | GSAQNMFGW |
| 4508 | GSCLKIAQE |
| 4509 | GSGLHMGYK |
| 4510 | GSRDSPISF |
| 4511 | GTAPPGTYS |
| 4512 | GTATMMHTH |
| 4513 | GVDLDNDRE |
| 4514 | GVFPMLMHS |
| 4515 | GVGWDSCHN |
| 4516 | GVIYRHHDP |
| 4517 | GVNFEDGAY |
| 4518 | GVTERFCPD |
| 4519 | GVWSKNTPF |
| 4520 | GWMSHEYPF |
| 4521 | GWWPGKPMD |
| 4522 | GYPRDPHET |
| 4523 | HAAMSGEGM |
| 4524 | HAEWACSGR |
| 4525 | HASYMCGLW |
| 4526 | HCEAVLVHG |
| 4527 | HDIRNVRML |
| 4528 | HDRWPKNCM |
| 4529 | HEPFRISGE |
| 4530 | HHWLGDCNS |
| 4531 | HIGTQYRQY |
| 4532 | HMRKTLIWK |
| 4533 | HPQFKSHEY |
| 4534 | HQYWMIPDG |
| 4535 | HSEPKLDIP |
| 4536 | HTAQLMAHE |
| 4537 | HTIAANMVA |
| 4538 | HTPTDAHVG |
| 4539 | HTTPAAFHN |
| 4540 | HVDPGFASL |
| 4541 | HWPFPWMRI |
| 4542 | IAFMKSVEG |
| 4543 | IAMAYKGQI |
| 4544 | IAYYEKMWS |
| 4545 | ICMSRTQMK |
| 4546 | IDPQGWLTH |
| 4547 | IDSFGELRE |
| 4548 | IGVRYAVQE |
| 4549 | IIRVQVDGS |
| 4550 | IMCKCPVWC |
| 4551 | IMEIVGIGN |
| 4552 | INSRTNSMC |
| 4553 | IPWPPVKGD |
| 4554 | IQKMWDHFQ |
| 4555 | IQRTMEANG |
| 4556 | IQVVKMAHG |
| 4557 | ISADQSMQD |
| 4558 | ISAWQDFDA |
| 4559 | ISEIHYTQC |
| 4560 | ITGGFNKDK |
| 4561 | ITNWFQQDK |
| 4562 | ITQVWCSDG |
| 4563 | ITTCYPNQT |
| 4564 | IVCQSHVMN |
| 4565 | IVTQRHYQI |
| 4566 | IYRPVDSFR |
| 4567 | KACDSKESW |
| 4568 | KANEDLKQF |
| 4569 | KCDYEHYFA |
| 4570 | KCKCPKMPQ |
| 4571 | KEHVYGMCP |
| 4572 | KFMSQEFGP |
| 4573 | KGCLLDSDH |
| 4574 | KGMDTTIVP |
| 4575 | KHERDPPQY |
| 4576 | KKFQRALTC |
| 4577 | KMEPVELFT |
| 4578 | KMQFIDACA |
| 4579 | KMRDGTEQK |
| 4580 | KNALYVSYQ |
| 4581 | KPPWINYPR |
| 4582 | KQAQALEYF |
| 4583 | KQDCYFWHT |
| 4584 | KSWDTIQYT |
| 4585 | KSYICEDFF |
| 4586 | KTEWLMWYN |
| 4587 | KTVIMEDFK |
| 4588 | KVTDCNQSG |
| 4589 | KWMHYDSIC |
| 4590 | LACQIDRFH |
| 4591 | LAELYLNMR |
| 4592 | LAGNQMDAD |
| 4593 | LAHGRCFHE |
| 4594 | LALSANLGG |
| 4595 | LAPPITWTD |
| 4596 | LASLAMAKA |
| 4597 | LATHALMAH |
| 4598 | LAWSQLLTP |
| 4599 | LCEPIAIRD |
| 4600 | LCIRSLANG |
| 4601 | LCMRYGSKA |
| 4602 | LDRPRFTDW |
| 4603 | LGQPVDDYS |
| 4604 | LHNLYEMSP |
| 4605 | LIEPDSFRG |
| 4606 | LKAEKNTMS |
| 4607 | LMVDVQRCK |
| 4608 | LMYCRYCPS |
| 4609 | LNAEWDEWT |
| 4610 | LNFLWAMLW |
| 4611 | LPCSLLRGD |
| 4612 | LPIPPVPEY |
| 4613 | LPRLNFESK |
| 4614 | LPSAVVMHE |
| 4615 | LQGLSWLFP |
| 4616 | LQNLFSYQE |
| 4617 | LQQQTHWYG |
| 4618 | LRSFIDTMD |
| 4619 | LSFCLGHND |
| 4620 | LSMIPMAQW |
| 4621 | LSYWSGNAA |
| 4622 | LTAPMEEDN |
| 4623 | LTCLQDGDA |
| 4624 | LTCQYQGGQ |
| 4625 | LTMGHTMQA |
| 4626 | LVHEPGAVT |
| 4627 | LVHQKWECK |
| 4628 | LVHREECQI |
| 4629 | LVHTIMMGS |
| 4630 | LYHAYSSGF |
| 4631 | MAANVSEEK |
| 4632 | MACAFGTNF |
| 4633 | MACWKNATE |
| 4634 | MAQIGPLHH |
| 4635 | MASTCTQQD |
| 4636 | MATRLFDSG |
| 4637 | MDFNIDWHT |
| 4638 | MEASNGFGL |
| 4639 | MEDSCRPGF |
| 4640 | MHMPCRVGK |
| 4641 | MIEENEWFG |
| 4642 | MILPIHHQQ |
| 4643 | MKQWPVFPS |
| 4644 | MLGVSTWEW |
| 4645 | MMRIDGLGP |
| 4646 | MNATQMYGQ |
| 4647 | MNGYYHVMN |
| 4648 | MNLGKNMWN |
| 4649 | MNMEYCQFG |
| 4650 | MPRLTTYTW |
| 4651 | MQGFFTRGF |
| 4652 | MQNKQASTP |
| 4653 | MSDLWPFSY |
| 4654 | MTACHTMGR |
| 4655 | MTCDFSAAE |
| 4656 | MTCHFQHMH |
| 4657 | MTCNWGLNG |
| 4658 | MTKPGIPNF |
| 4659 | MTMDWQFQG |
| 4660 | MTSIVMENA |
| 4661 | MTSRVDRTD |
| 4662 | MVENWAKDM |
| 4663 | MVEQFACLP |
| 4664 | MVLCYNQMV |
| 4665 | MVNMHVFHS |
| 4666 | MVSVVRQGS |
| 4667 | MVTEYYHDV |
| 4668 | MWTMFNGQF |
| 4669 | MYDTACVIG |
| 4670 | MYWPDISRN |
| 4671 | NATPWNFGT |
| 4672 | NAVEKMAFN |
| 4673 | NAYMQQAQG |
| 4674 | NCMQMHWDG |
| 4675 | NCNCDEYHY |
| 4676 | NDGFDFWTC |
| 4677 | NELNNGREF |
| 4678 | NEPWPDHLP |
| 4679 | NFCYKNIYA |
| 4680 | NFMCSAGHT |
| 4681 | NGPWDWWIN |
| 4682 | NHFCGEWLQ |
| 4683 | NHWILSCAE |
| 4684 | NIERTVKHM |
| 4685 | NIKHEEMWN |
| 4686 | NIMTVDMWP |
| 4687 | NIPFKERSW |
| 4688 | NKPCWPCPH |
| 4689 | NKSDMSCYG |
| 4690 | NMSVYMKLG |
| 4691 | NPHARTVNG |
| 4692 | NPMPDWNFT |
| 4693 | NPSMGYFGF |
| 4694 | NQRIMDAGL |
| 4695 | NRHLGNNPW |
| 4696 | NRMNYDAWG |
| 4697 | NRWSVYRAE |
| 4698 | NTGCLKQAT |
| 4699 | NTLRHCVHT |
| 4700 | NTMQAMDVH |
| 4701 | NTQWNQKVP |
| 4702 | NVATQFWDM |
| 4703 | NVGMYGQKA |
| 4704 | NVHCQAASQ |
| 4705 | NVIEYQNRD |
| 4706 | NVPPPKFMA |
| 4707 | NYALLGDWE |
| 4708 | PCDVNHTSG |
| 4709 | PCEFSTCVR |
| 4710 | PCKGPPDIS |
| 4711 | PCNDHPCAG |
| 4712 | PCPCKGDAA |
| 4713 | PDAERKPTW |
| 4714 | PDCEKYENE |
| 4715 | PDCFPWDHN |
| 4716 | PDCGEWYPG |
| 4717 | PDGILNTWW |
| 4718 | PDICMQSGW |
| 4719 | PDLWTWQSD |
| 4720 | PDPWFMMRP |
| 4721 | PEAELPDTS |
| 4722 | PEKMRWMHH |
| 4723 | PELTLVNPG |
| 4724 | PFFPIDELG |
| 4725 | PFNCKWGMF |
| 4726 | PFNDHESEK |
| 4727 | PGDQNSYPG |
| 4728 | PGDRQEKMY |
| 4729 | PGKEFQPKW |
| 4730 | PGLLDNIPS |
| 4731 | PGPRPGEMC |
| 4732 | PHMPPFHCD |
| 4733 | PIAPHNDYW |
| 4734 | PIDQNPKFG |
| 4735 | PIPSPYCGF |
| 4736 | PKGSKYHEW |
| 4737 | PKIEPPFHS |
| 4738 | PKRGDSLPN |
| 4739 | PLKSGWTRT |
| 4740 | PLRTEISPW |
| 4741 | PNECARGDC |
| 4742 | PNFFNYHTS |
| 4743 | PNGLAELKP |
| 4744 | PPHCL WNTI |
| 4745 | PPIMMTIAN |
| 4746 | PPISHYWFD |
| 4747 | PPKCHQWQW |
| 4748 | PPLDTEHYF |
| 4749 | PPLISGFET |
| 4750 | PPNDRRFYD |
| 4751 | PPPCLEAPY |
| 4752 | PPPMQGSRM |
| 4753 | PPPWHQFDE |
| 4754 | PPRCEMLCM |
| 4755 | PPRMPYHPY |
| 4756 | PPVRMLFKQ |
| 4757 | PPWYHKGNS |
| 4758 | PQYEQYWQE |
| 4759 | PREYHPEEP |
| 4760 | PRFCMWCCG |
| 4761 | PRLICHERS |
| 4762 | PSIHGWELG |
| 4763 | PVKSEMWPT |
| 4764 | PWERWEHKG |
| 4765 | PYHPPTSGN |
| 4766 | PYLPDGNPM |
| 4767 | PYSCIPDGC |
| 4768 | QAACKIADL |
| 4769 | QCEAVRRCR |
| 4770 | QCLLIHEVG |
| 4771 | QCTKLHDWH |
| 4772 | QEKAMDNFQ |
| 4773 | QEYSQWWDN |
| 4774 | QFGTHHRHN |
| 4775 | QFTHMNWLQ |
| 4776 | QGCHLMTGQ |
| 4777 | QGDFCQQMN |
| 4778 | QGGWNSTCE |
| 4779 | QGKENNVEE |
| 4780 | QHDSKVAWM |
| 4781 | QHVHKDGIE |
| 4782 | QHYQPGPHN |
| 4783 | QIEYAQMVG |
| 4784 | QIQPVSCPN |
| 4785 | QKQYQDCVT |
| 4786 | QMAHVQYQQ |
| 4787 | QNIQMHFLG |
| 4788 | QNRETIVGG |
| 4789 | QPMTREMPP |
| 4790 | QQHQYTSKQ |
| 4791 | QSCMKIHHA |
| 4792 | QSISYTHND |
| 4793 | QSNLKKEDH |
| 4794 | QSSIENRFN |
| 4795 | QSSYYYAQS |
| 4796 | QSVKYNWGH |
| 4797 | QTDVTQSMY |
| 4798 | QTECLKWMR |
| 4799 | QTGLYNVMV |
| 4800 | QTHTQTYSW |
| 4801 | QVDDGKGPE |
| 4802 | QVIAVQDFR |
| 4803 | QVVECQHIG |
| 4804 | QVWDYERGI |
| 4805 | QYCPNSLEF |
| 4806 | QYQQSTVSN |
| 4807 | QYRNIDEDY |
| 4808 | RDMCQWDQP |
| 4809 | RGVHVEVEE |
| 4810 | RMQPINARI |
| 4811 | RMVGLEKAY |
| 4812 | RNQLKIDDM |
| 4813 | RSTGILEHC |
| 4814 | RSTSDPAML |
| 4815 | RTAWDQPFS |
| 4816 | RTNEAMMWN |
| 4817 | RVDYCYYFQ |
| 4818 | SACHNNTLQ |
| 4819 | SAGYLQKVH |
| 4820 | SASEAIAHQ |
| 4821 | SCCQQFNSG |
| 4822 | SDNGEYYRI |
| 4823 | SDNIQVWPW |
| 4824 | SDRQRFIPW |
| 4825 | SFCGLLTGR |
| 4826 | SGCPYWWPS |
| 4827 | SGKEQDSWN |
| 4828 | SHDVSGSCE |
| 4829 | SHFCYSMQE |
| 4830 | SISWKHSEA |
| 4831 | SITVQHEIS |
| 4832 | SKQCTGKEA |
| 4833 | SLAWNRVIQ |
| 4834 | SLPNEGYYP |
| 4835 | SMAWRNVIP |
| 4836 | SMCYVHGKE |
| 4837 | SMEKPSHYQ |
| 4838 | SPWYDQLCW |
| 4839 | SSADNVCWS |
| 4840 | SSCQFVADL |
| 4841 | SSDQYEEMN |
| 4842 | SSLCCNVGW |
| 4843 | STDQYNQDF |
| 4844 | STISEGSKN |
| 4845 | STLRHALIE |
| 4846 | SVAHSPMQC |
| 4847 | SVAMKQIEE |
| 4848 | SVGDNSFEH |
| 4849 | SVLTPHVTF |
| 4850 | SVTFKHQHQ |
| 4851 | SYKEYLHDE |
| 4852 | SYMWLQKGQ |
| 4853 | SYSIKQFHP |
| 4854 | TAAFMTTRD |
| 4855 | TACKWVHAC |
| 4856 | TANPTQGMQ |
| 4857 | TAVDHGLFH |
| 4858 | TCEPAVFGN |
| 4859 | TCEVYRQEC |
| 4860 | TCMRYNQHH |
| 4861 | TCQIAHQEA |
| 4862 | TECISKYPT |
| 4863 | TGHQYEWGY |
| 4864 | THHSSNQFF |
| 4865 | TKTATDFWQ |
| 4866 | TLQWMNAYR |
| 4867 | TMGMKHACC |
| 4868 | TPEHSVPGH |
| 4869 | TPKCGLWKD |
| 4870 | TQDEQRTMP |
| 4871 | TQHPYMKWH |
| 4872 | TSCEWDMMV |
| 4873 | TSMCYRTEE |
| 4874 | TTAFIGMHF |
| 4875 | TTAVLRENG |
| 4876 | TTLAVAHTG |
| 4877 | TVAGWMSHN |
| 4878 | TVAQSEAEF |
| 4879 | TVDMVNREQ |
| 4880 | TVFRVVQCA |
| 4881 | TVGHPGHAC |
| 4882 | TVHMWDQHA |
| 4883 | TWRMKGDDK |
| 4884 | TYNLCTLQP |
| 4885 | VAGIHDVVP |
| 4886 | VAKQLDCLG |
| 4887 | VATELPADY |
| 4888 | VCDQMQSFN |
| 4889 | VGIEMMGSG |
| 4890 | VHTHIIQDL |
| 4891 | VIKNCYEAQ |
| 4892 | VKAELHKTY |
| 4893 | VKEHSHFCP |
| 4894 | VKNTVHEMQ |
| 4895 | VKQLFTKDN |
| 4896 | VKSQSNGWN |
| 4897 | VNFQYNLGI |
| 4898 | VRAVKDTEG |
| 4899 | VSNHRPLMP |
| 4900 | VSQGIPKCE |
| 4901 | VTQMGHMMV |
| 4902 | VTQPKTDQT |
| 4903 | VTYGNMEDR |
| 4904 | VVCRMSGQD |
| 4905 | VVGNANEQK |
| 4906 | VVSKCEEMG |
| 4907 | WDEKPYFGF |
| 4908 | WDWWEVHRA |
| 4909 | WENQGDLTR |
| 4910 | WFQQSIMFI |
| 4911 | WGMPPKDNM |
| 4912 | WGPQNLFQG |
| 4913 | WLWWEEPLW |
| 4914 | WNIAPWDCS |
| 4915 | WTYMEASDF |
| 4916 | YCPKDDMVY |
| 4917 | YCPSKLPRN |
| 4918 | YEIKPEIVG |
| 4919 | YEQNSMWMC |
| 4920 | YGAPATWCD |
| 4921 | YGKIKIYEW |
| 4922 | YGPDLMRNE |
| 4923 | YIDRLTYSF |
| 4924 | YKESDWKIC |
| 4925 | YMPVLKDQA |
| 4926 | YPDLKEPMS |
| 4927 | YPGLRYTRS |
| 4928 | YPPVDQTPY |
| 4929 | YQPRNECIQ |
| 4930 | YQYPHELHY |
| 4931 | YSNVGSRYA |
| 4932 | YTHKLEAGN |
| 4933 | YWDNQWLKI |

[0260] In some embodiments, the engineered AAV VP capsid polypeptide comprises a polypeptide sequence represented by the formula: (A)-(X)—(B) wherein: (A) is the polypeptide sequence of SEQ ID NO: 5812 (VAYNVGGQMATNNQSSTTAP, corresponding to residues 561 to 580 of SEQ ID NO: 2); (X) is the 581-589 region having a polypeptide sequence selected from the list of polypeptides in TABLE 6 (SEQ ID NO: 4934-SEQ ID NO: 5233) with increased likelihood of conferring muscle tissue tropism or preference on a recombinant AAV virion (rAAV); and (B) is the polypeptide sequence of SEQ ID NO: 5813 (IVPGSVWMIERDVYLQGPIWA, corresponding to residues 590 to 609 of SEQ ID NO: 2); and wherein the capsid polypeptide is capable of assembling into the rAAV and, the capsid does not have the sequence ofany of SEQ ID NO: 1, SEQ ID NO: 3, SEQ ID NO: 4, SEQ ID NO: 5, SEQ ID NO: 6, SEQ ID NO: 7, or SEQ ID NO: 8. Also encompassed herein are rAAVs composed of engineered AAV5 VP2 capsid polypeptides and engineered AAV5 VP3 capsid polypeptides comprising a 581-589 region having a sequence selected from the list of polypeptides in TABLE 6 (SEQ ID NO: 4934-SEQ ID NO: 5233) at the region corresponding to amino acid residues 445 to 453 in AAV5 VP2 or the region corresponding to amino acid residues 389 to 397 in AAV5 CP3.

TABLE 6
Additional Sequences of 581-589 Regions
for Muscle Tropism

| SEQ ID | |
|---|---|
| NO | Sequence |
| 4934 | CVMSLLKVP |
| 4935 | CWVSYPFWM |
| 4936 | CVMPYSNHP |
| 4937 | PPIKDMLFK |
| 4938 | CVLNWHVGS |
| 4939 | PFPPPHKTL |
| 4940 | GDPPPLSFK |
| 4941 | CVRSLFWVF |
| 4942 | CIVMYSNKY |
| 4943 | CIVFYMKNQ |
| 4944 | CWKWQMMFG |
| 4945 | CVQQQFSAM |
| 4946 | CIVPNKFMW |
| 4947 | CVNYPNQAF |
| 4948 | CVKYSNQQG |
| 4949 | CYHQVFSQG |
| 4950 | CVMNPMVFK |
| 4951 | CVKQRGQRS |
| 4952 | CVILSTRDK |
| 4953 | CWKPWYLHG |
| 4954 | CVMGSYLSM |
| 4955 | CVWSQILGG |
| 4956 | CIKHWFVKF |
| 4957 | CIQLKRKMH |
| 4958 | CIQQLMWQN |
| 4959 | CVGPYRFGG |
| 4960 | CWREFSFQN |
| 4961 | CVYSVWKTS |
| 4962 | CVKLHQFEE |
| 4963 | CIMRWNSYG |
| 4964 | CVGKYGGHS |
| 4965 | CVQLVKEIG |
| 4966 | CVAMLHHYY |
| 4967 | CVMVPKGAG |
| 4968 | EDWMDMDLK |
| 4969 | CIGMKMQNG |
| 4970 | CINFIMKLG |
| 4971 | RIQEPPFPW |
| 4972 | CVLVFSNSG |
| 4973 | CAYMQQMHG |
| 4974 | CYFLIQQNF |
| 4975 | CAVPQVYQS |
| 4976 | RIKEPPDPK |
| 4977 | CVYLKGSLC |
| 4978 | CVYHKEMTS |
| 4979 | CVNFKTRQN |
| 4980 | CDDFKKKMT |
| 4981 | CISNLRMHG |
| 4982 | CWSVMPMAG |
| 4983 | CVNKVHSYN |
| 4984 | CSVLKHHGW |
| 4985 | CIKFFPIQG |
| 4986 | CVFSTSFGE |
| 4987 | CVSLYMDKL |
| 4988 | CVSHSHHGS |
| 4989 | CQMMPMKMD |
| 4990 | CMVPYNMYQ |
| 4991 | CWSQNQQGH |
| 4992 | CVFTIFEAK |
| 4993 | CVKQYMEMN |
| 4994 | CVMTTPLWF |
| 4995 | CVGYRVHSP |
| 4996 | CVLSIRIIS |
| 4997 | CVEYFLLHP |
| 4998 | CPRPLMKNF |
| 4999 | CVGLLEHSV |
| 5000 | CISPVMMYH |
| 5001 | CVVMSQMWM |
| 5002 | CYNMYKMWS |
| 5003 | QRPHRFPRH |
| 5004 | CVMGKTVFN |
| 5005 | CVHFKQFTW |
| 5006 | CVRWKHFGY |
| 5007 | CGNYIMYYK |
| 5008 | CFICIMPKT |
| 5009 | CVIYTRKHE |
| 5010 | CITRQQNEQ |
| 5011 | CILQMIILG |
| 5012 | MVEEPVGPL |
| 5013 | CVSMLGNHP |
| 5014 | CIMWKKPAD |
| 5015 | CVASYTLKP |
| 5016 | CVFQDMLFK |
| 5017 | CFYKIQHKG |
| 5018 | CTVFPIQSG |
| 5019 | CWVYMQGPS |
| 5020 | CISQNPMVY |
| 5021 | CTSPPRMWD |
| 5022 | CVQMMWPFP |
| 5023 | CVYTWGMQG |
| 5024 | CVHVHQLYG |
| 5025 | CIKLGNIIM |
| 5026 | CTRSLLGMG |
| 5027 | CVIRSSDQE |
| 5028 | WHPGRNEKC |
| 5029 | CSFNIHKHT |
| 5030 | CVSQMGKWP |
| 5031 | PIENPDQRI |
| 5032 | CITFYGMWW |
| 5033 | CVYTNVTSN |
| 5034 | CVKQLSYWQ |
| 5035 | CWGYPQVLM |
| 5036 | CIKFKSPSD |
| 5037 | CVTVSGRDY |
| 5038 | CVVWPVLGQ |
| 5039 | CVSWKNSGQ |
| 5040 | CVLRMGTFC |
| 5041 | CVGEFDSHR |
| 5042 | CIMWYTNNP |
| 5043 | CVIWQQITL |
| 5044 | CVVVYLKMC |
| 5045 | CVFPQVGKQ |
| 5046 | CVTQLFHQL |
| 5047 | HDESKSEPE |
| 5048 | CTRHMFRLG |
| 5049 | CIHKHPVSP |
| 5050 | CHFHQMIFY |
| 5051 | CTIPMQIIQ |
| 5052 | CVMMMNTKF |
| 5053 | CIMLHPVSF |
| 5054 | CYKYWPMHL |
| 5055 | CVVQNLFSG |
| 5056 | CVLNYFQFG |
| 5057 | CWYYRFKKN |
| 5058 | PPLSFRPIP |
| 5059 | CWKSMQFQY |
| 5060 | CVVQWGKWN |
| 5061 | DVEDDMEDN |
| 5062 | CFIPYYKMG |
| 5063 | KPEWWGILK |
| 5064 | CWNLFQISR |
| 5065 | CVKEFMMGC |
| 5066 | ADDDEDMEI |
| 5067 | CFWIKKNEI |
| 5068 | CVGSQNHIT |
| 5069 | CAMPYHFYW |
| 5070 | CVQMKVLFG |
| 5071 | CWMNMFSKH |
| 5072 | CVVNQHKFI |
| 5073 | CIKFEWRHN |
| 5074 | PRTPPREQR |
| 5075 | CINKYSGNT |
| 5076 | FHPKPHPQN |
| 5077 | CVGSQLHAM |
| 5078 | CIFMNGFMG |
| 5079 | REPNPLKSL |
| 5080 | CVGRQLMYS |
| 5081 | CVSIHQKNS |
| 5082 | QNGINNFPD |
| 5083 | CVSHSTFQS |
| 5084 | CWPSMQLNY |
| 5085 | CWILMLQMY |
| 5086 | CVGAGGKVT |
| 5087 | CVQHFMEHI |
| 5088 | CVIHIMMYD |
| 5089 | CWGYIHNFL |
| 5090 | HFRQPWPFK |
| 5091 | PHGEPRKIS |
| 5092 | CISNYLKQG |
| 5093 | CVWLKLFWY |
| 5094 | CTHMNLLHM |
| 5095 | CVMFREGSR |
| 5096 | CTIFMKSSN |
| 5097 | CVMTLVMMC |
| 5098 | CITKTKGQS |
| 5099 | CVIEILLWH |
| 5100 | CIMMRIPCG |
| 5101 | CVRSQLCNE |
| 5102 | CVGLKGIFE |
| 5103 | CVFWLGIRS |
| 5104 | CVGLLLFHG |
| 5105 | CVHPFVSWK |
| 5106 | CVQQTMFNL |
| 5107 | CVKTQGFIH |
| 5108 | CWQFFMSLV |
| 5109 | CIVPNQTRM |
| 5110 | RNDWKWPQE |
| 5111 | CRLYYIQHP |
| 5112 | MPFFDWIFK |
| 5113 | CVTHIQTGY |
| 5114 | PHINKWKMY |
| 5115 | IIMDQDSPK |
| 5116 | CWQKRDILF |
| 5117 | MVIFKNGKP |
| 5118 | CFWIHKMAA |
| 5119 | CAFPLNRQK |
| 5120 | LMMCPIHQT |
| 5121 | CMGRQFLQS |
| 5122 | WKNRDEKNI |
| 5123 | CIILLGSRD |
| 5124 | RTNYRPPAC |
| 5125 | CIMQYIKMY |
| 5126 | NIRQYMLQN |
| 5127 | CVFQKMNSD |
| 5128 | CVQLHKNHG |
| 5129 | CVFKMEPTE |
| 5130 | CSNIWVPKM |
| 5131 | CNVSYMFMG |
| 5132 | CVRRSLGLP |
| 5133 | CWYSTFKRG |
| 5134 | CVAMHRHNS |
| 5135 | CIIVKISKG |
| 5136 | WFVWIYPLK |
| 5137 | CGPYIVSLR |
| 5138 | CVSLFLHSG |
| 5139 | CMHQLRNRF |
| 5140 | HNYLPRNRP |
| 5141 | CVGIIQMGF |
| 5142 | CIKLNHHHK |
| 5143 | CWRHNIISP |
| 5144 | WIFFKDFMM |
| 5145 | LPRWMINPY |
| 5146 | PPTHDCKPK |
| 5147 | PPYCLDMKR |
| 5148 | CVHVYNFQM |
| 5149 | CVDSYIRWM |
| 5150 | CFLRLKKHH |
| 5151 | CKVLYIQIG |
| 5152 | CIVNTKKYH |
| 5153 | CVRGIFSDH |
| 5154 | CVGRILRSC |
| 5155 | CVIWYHKYE |
| 5156 | YICFVSYRN |
| 5157 | CWTKLVQHQ |
| 5158 | CVMNWDFFI |
| 5159 | CVMFAHNTQ |
| 5160 | CVLYFTFGK |
| 5161 | CTHMMGKSP |
| 5162 | WDTQLLPNI |
| 5163 | CFIHMQKFP |
| 5164 | CSMPLYSYY |
| 5165 | CIQSFGSGP |
| 5166 | YWGEFIKKS |
| 5167 | CISKKGRWY |
| 5168 | CIKQIKTYE |
| 5169 | CTQPFNRQD |
| 5170 | CVSWLLGQG |
| 5171 | DPEDDPGNE |
| 5172 | CVGHGSHQK |
| 5173 | CWKMFSLHG |
| 5174 | CIMKPDNYP |
| 5175 | CVQQLVQIE |
| 5176 | EEPEPYLKN |
| 5177 | CIRFQNPPF |
| 5178 | CIKWVDIFP |
| 5179 | NGPFGEWKR |
| 5180 | YNPDDKRVI |
| 5181 | DEGHKKFLK |
| 5182 | CVRSYQIVG |
| 5183 | PPRHQWNFY |
| 5184 | CISSKLRGF |
| 5185 | CVTFQLGWQ |
| 5186 | ATYLKMSSP |
| 5187 | CVSGSNFPH |
| 5188 | CVSFYNHME |
| 5189 | CFHVMMKYE |
| 5190 | CVWRITQQE |
| 5191 | DVDELDIHI |
| 5192 | CWAKIMPLF |
| 5193 | CWSHLYFQT |
| 5194 | EVLDWIETE |
| 5195 | CHYQNLKTH |
| 5196 | CVTQQHRDG |
| 5197 | CVVMMQIWP |
| 5198 | PRKYPWKKK |
| 5199 | CGCRFIYYQ |
| 5200 | QRWKHDPLP |
| 5201 | CVSLLEMSI |
| 5202 | HNIKPWKPY |
| 5203 | QENETFKKL |
| 5204 | DVDEEQDIF |
| 5205 | CVACKMKTG |
| 5206 | CFFYPMSMS |
| 5207 | PDERLFNKK |
| 5208 | CSTPMRMYM |
| 5209 | CFWQYGLVT |
| 5210 | CWLPFQMFH |
| 5211 | CTRQSIIVY |
| 5212 | CISVYFMWP |
| 5213 | DPRKLEPRI |
| 5214 | CTIGTMGPF |
| 5215 | CVRTLQSPD |
| 5216 | QDRFNHKPW |
| 5217 | CVSTVLNMG |
| 5218 | GDFPDEDDW |
| 5219 | CVWIWQNSY |
| 5220 | ETEYYQPFL |
| 5221 | YCPHRDRTH |
| 5222 | FEDEPEPWK |
| 5223 | PFDEGEPEI |
| 5224 | CVLKGKHEG |
| 5225 | CVQVLQLGG |
| 5226 | CTISQKMIW |
| 5227 | PKMSLMKFN |
| 5228 | CWSMYNSRY |
| 5229 | CWVMLYRGW |
| 5230 | CWTRQSNWP |
| 5231 | CVSPYTGLL |
| 5232 | PPPFFKYRG |
| 5233 | CTLYFGFIY |

[0261] In some embodiments, the engineered AAV VP capsid polypeptide comprises a polypeptide sequence represented by the formula: (A)-(X)—(B) wherein: (A) is the polypeptide sequence of SEQ ID NO: 5812 (VAYNVGGQMATNNQSSTTAP, corresponding to residues 561 to 580 of SEQ ID NO: 2); (X) is the 581-589 region having a polypeptide sequence selected from the list of polypeptides in TABLE 7 (SEQ ID NO: 5808-SEQ ID NO: 5811) with increased likelihood of conferring CNS tissue tropism or preference on a recombinant AAV virion (rAAV); and (B) is the polypeptide sequence of SEQ ID NO: 5813 (IVPGSVWMERDVYLQGPIWA, corresponding to residues 590 to 609 of SEQ ID NO: 2); and wherein the capsid polypeptide is capable of assembling into the rAAV and, the capsid does not have the sequence of any of SEQ ID NO: 1, SEQ ID NO: 3, SEQ ID NO: 4, SEQ ID NO: 5, SEQ ID NO: 6, SEQ ID NO: 7, or SEQ ID NO: 8. Also encompassed herein are rAAVs composed of engineered AAV5 VP2 capsid polypeptides and engineered AAV5 VP3 capsid polypeptides comprising a 581-589 region having a sequence selected from the list of polypeptides in TABLE 7 (SEQ ID NO: 5808-SEQ ID NO: 5811) at the region corresponding to amino acid residues 445 to 453 in AAV5 VP2 or the region corresponding to amino acid residues 389 to 397 in AAV5 VP3.

TABLE 7
Additional Sequences of 581-589 Regions
for Muscle Tropism

| SEQ ID NO | Sequence |
|---|---|
| 5808 | DDFGTLPRM |
| 5809 | GIIQVRMEW |
| 5810 | GQFEDLLVL |
| 5811 | RKEGCTSHG |

[0262] In some embodiments, the engineered AAV VP capsid polypeptide confers muscle tissue tropism or preference, wherein the muscle tissue is selected from the group consisting of aorta, esophagus, heart (e.g., atrium, ventricle, valves), skeletal muscle (e.g., biceps, brachii, femoris, diaphragm, gastrocnemius, tibialis anterior, triceps, quadriceps, including vastus lateralis)), muscle fibers including type I (slow oxidative) fibers, type IC fibers, type II fibers, type IIC fibers, type IIA (fast oxidative/glycolytic) fibers, type IIAX fibers, type IIXA fibers, type IIX (fast glycolytic) fibers, and any combination thereof.

[0263] Described below are engineered mutated AAV5 VP1 polypeptide sequences that confer stable or improved virion assembly, tissue tropism, or both. In some embodiments, the present disclosure provides an AAV5 VP1 capsid polypeptide having a sequence homology of no more than 98.7% to SEQ ID NO: 1, wherein the AAV5 capsid polypeptide sequence has at least one mutation in a region from a position corresponding to 581 to a position corresponding to 589 of SEQ ID NO: 1. In some embodiments, an engineered AAV5 polypeptide comprises a variant 581-589 region (e.g., comprising at least one amino acid substitution relative to residues 561 to 580 of SEQ ID NO: 1).

[0264] Also encompassed herein are rAAVs composed of engineered AAV5 VP2 capsid polypeptides and engineered AAV5 VP3 capsid polypeptides comprising a 581-589 region having a sequence selected from the list of polypeptides in TABLE 2, TABLE 3, TABLE 4, TABLE 5, TABLE 6, or TABLE 7 (SEQ ID NO: 12-SEQ ID NO: 3937, SEQ ID NO: 3938-SEQ ID NO: 4237, SEQ ID NO: 4238-SEQ ID NO: 4933, SEQ ID NO: 4934-SEQ ID NO: 5233, SEQ ID NO: 5234-SEQ ID NO: 5807, or SEQ ID NO: 5808-SEQ ID NO: 5811) at the region corresponding to amino acid residues 445 to 453 in AAV5 VP2 or the region corresponding to amino acid residues 389 to 397 in AAV5 VP3. Also encompassed herein are rAAVs composed of engineered AAV5 VP2 capsid polypeptides and engineered AAV5 VP3 capsid polypeptides comprising a 581-589 region having a sequence selected from the list of polypeptides in TABLE 9, TABLE 10, TABLE 11, or TABLE 10 at the region corresponding to amino acid residues 445 to 453 in AAV5 VP2 or the region corresponding to amino acid residues 389 to 397 in AAV5 VP3.

Engineered VP Polypeptides Competent for rAAV Assembly

[0265] In various preferred embodiments, the mutated (engineered, recombinant) VP capsid polypeptides of the present disclosure (e.g., comprising a variant 581-589 region) are capable of forming an assembled virion, and in some instances that exhibit similar or improved stability when compared to a virion that comprises the AAV5 VP1 capsid polypeptide of SEQ ID NO: 1.

[0266] The frequency of a given amino acid residue occurring in assembled, purified viruses at a specified position within the 581-589 region, corresponding to position 581 to position 589 of SEQ ID NO: 1, or corresponding to X¹ to X⁹ as generalized in SEQ ID NO: 2, over the frequency of that given amino acid residue occurring at the specified position in the entire plasmid library was analyzed to identify sequence rules for capsid polypeptide sequences that favor viral capsid assembly. Based on the determined amino acid residue frequency, the contribution of each amino acid at each position of the 581-589 region to capsid assembly was determined, and sequences of the 581-589 region (X¹X²X³X⁴X⁵X⁶X⁷X⁸X⁹ of SEQ ID NO: 2) that favor capsid assembly, and rules for selecting sequences that favor capsid assembly, were identified.

[0267] Disclosed herein are engineered AAV5 VP capsid polypeptides capable of forming an assembled viral capsid that may exhibit similar or improved stability as compared to wild type AAV5 VP capsid polypeptide, wherein the engineered variant AAV5 VP capsid polypeptide sequence has one or more mutations, wherein the VP1 polypeptide sequence has said one or more mutations in a 581-589 region (corresponding to position 581 to position 589 in SEQ ID NO: 2), and wherein X¹ is selected from A, D, E, G, L, M, N, Q, S, T, or V, or X¹ is selected from A, D, E, M, or T. In some embodiments, X¹ is E; or X² is selected from A, C, D, E, G, H, I, N, P, Q, S, T, or V, or X² is selected from A, S, T, or V, or X² is A; or wherein X³ is selected from A, D, E, G, H, M, N, Q, S, T, or V, or X³ is selected from D, E, N, Q or T, or X³ is D or T; or wherein X⁴ is selected from A, D, E, G, H, N, P, Q, S, or T, or X⁴ is selected from D, E, P, or Q, or X⁴ is E; or wherein X⁵ is selected from A, C, D, E, G, H, N, Q, S, T, or Y, or X⁵ is selected from D, E, N, Q or T, or X⁵ is N; or wherein X⁶ is selected from A, D, E, G, H, N, P, Q, S, or T, or X⁶ is selected from D, N, or Q, or X⁶ is D; or wherein X⁷ is selected from A, C, D, E, G, H, N, Q, S, or T, or X⁷ is selected from A, D, E or G, or X⁷ is A; or wherein X⁸ is selected from A, C, D, E, G, H, N, Q, S, or T, or X⁸ comprises A, D, G, or S, or X⁸ is G; or wherein X⁹ is selected from A, D, E, G, H, N, P, Q, S, or T, or X⁹ is selected from A, D, G, or P, or X⁹ is G.

[0268] In various embodiments, the VP polypeptide is capable of forming an assembled viral capsid, and in some instances exhibits similar or improved stability when compared to a virion that comprises the AAV5 VP1 capsid polypeptide of SEQ ID NO:1.

[0269] Examples of amino acid substitutions within a 581-589 region that may favor viral capsid assembly are provided in TABLE 8. In some embodiments, the following amino acids can be independently mutated, in any combination, at any one or more positions X¹ to X⁹, with reference to SEQ ID NO: 2, to provide an AAV VP1 capsid that is capable of assembling. Additionally, one or more mutations outside of the X¹ to X⁹ region can be allowed, as long as the capsid is still capable of assembling.

TABLE 8
581-589 Region Amino Acid Variations for Viral Assembly
Viral Assembly Options

X¹ is A, D, E, G, L, M, N, Q, S, T, or V
X¹ is A, D, E, M, or T
X¹ is E
X² is A, C, D, E, G, H, I, N, P, Q, S, T, or V
X² is A, S, T, or V
X² is A
X³ is A, D, E, G, H, M, N, Q, S, T, or V
X³ is D, E, N, Q or T
X³ is D or T
X⁴ is A, D, E, G, H, N, P, Q, S, or T
X⁴ is D, E, P, or Q
X⁴ is E
X⁵ is A, C, D, E, G, H, N, Q, S, T, or Y
X⁵ is D, E, N, Q or T
X⁵ is N.
X⁶ is A, D, E, G, H, N, P, Q, S, or T;
X⁶ is D, N, or Q; or
X⁶ is D.
X⁷ is A, C, D, E, G, H, N, Q, S, or T;
X⁷ is A, D, E or G; or
X⁷ is A.
X⁸ is A, C, D, E, G, H, N, Q, S, or T;
X⁸ is A, D, G, or S; or
X⁸ is G.
X⁹ is A, D, E, G, H, N, P, Q, S, or T;
X⁹ is A, D, G, or P; or
X⁹ is G.

### Variant 581-589 Regions for CNS Tissue Tropism

[0270] The present disclosure provides AAV5 virions with a VP capsid polypeptide having at least one mutation in a region with residues that interact with target cells (e.g., a target CNS cell in a target CNS tissue of interest), where the mutation confers increased CNS tissue tropism or preference as compared to a wild type VP capsid polypeptide (e.g., a VP capsid polypeptide of SEQ ID NO: 1, SEQ ID NO: 10, or SEQ ID NO: 11). In some embodiments, provided herein are AAV5 VP1 capsid polypeptide having a sequence homology of at least 80% to SEQ ID NO: 1, wherein the AAV5 VP1 capsid polypeptide has at least one mutation in a 581-589 region, corresponding to residues 581 to 589 of SEQ ID NO: 1, and wherein said at least one mutation drives increased central nervous system (CNS) tropism or preference as compared to the wild type VP capsid polypeptide (SEQ ID NO: 1). The following sequences rules and sequences also apply to the 581-589 region in AAV5 VP2 (amino acid residues 445 to 453; VP2 sequence shown in SEQ ID NO: 10) and in AAV5 VP3 (amino acid residues 389 to 397; VP3 sequences shown in SEQ ID NO: 11). Thus, the present disclosure encompasses AAV5 VP2 capsid polypeptides and AAV5 VP3 capsid polypeptides having one or more amino acid substitutions in the 581-589 regions of VP2 and VP3, corresponding to the AAV5 VP1 amino acid residues of the 581 to 589, where the one or more mutations comport to the rules or sequences in the following section.

[0271] VP capsid polypeptides (e.g., V1, VP2, or VP3 capsid polypeptides, or combinations thereof) comprising a CNS tissue-tropic 581-589 region (e.g., any one of SEQ ID NO: 12-SEQ ID NO: 3937 or SEQ ID NO: 3938-SEQ ID NO: 4237, or any 581-589 region adhering to the rules identified herein) may assemble to form an rAAV with altered surface properties compared to a wild type AAV (e.g., comprising a VP1 polypeptide of SEQ ID NO: 1). The surface may form an interface that forms interactions with a target tissue, and the altered surface properties of the rAAV may promote tissue specific interactions (e.g., CNS tissue-specific interactions) between the rAAV and the target tissue. In some embodiments, the altered surface properties may be an altered charge distribution, increased or decreased hydrophobicity, altered availability or distribution of hydrogen bond donors or acceptors, or formation or reshaping of binding pockets. Such altered surface properties may favor interactions between the rAAV and CNS tissue while disfavoring interactions between the rAAV and non-CNS tissue.

[0272] A CNS-tropic rAAV assembled from VP capsid polypeptides (e.g., V1, VP2, or VP3 capsid polypeptides, or combinations thereof) comprising a 581-589 region (e.g., any one of SEQ ID NO: 12-SEQ ID NO: 3937 or SEQ ID NO: 3938-SEQ ID NO: 4237, or any 581-589 region adhering to the rules identified herein) may preferentially infect a CNS tissue (e.g., cortex forebrain, cortex occipital, cortex temporal, thalamus, hypothalamus, substantia nigra, hippocampus DG, hippocampus CA1, hippocampus CA3, cerebellum, or combinations thereof) as compared to non-CNS tissue (e.g., liver, skeletal muscle, heart, lung, spleen, lymph node, bone marrow, mammary gland, skin, adrenal gland, thyroid, colon, sciatic nerve, spinal cord, or combinations thereof) at a higher level as compared to wild type AAV5. The CNS-tropic AAV may infect the CNS tissue at a rate that is at least about 1.1-fold, at least about 1.2-fold, at least about 1.3-fold, at least about 1.4-fold, at least about 1.5-fold, at least about 1.6-fold, at least about 1.7-fold, at least about 1.8-fold, at least about 1.9-fold, at least about 2-fold, at least about 2.2-fold, at least about 2.4-fold, at least about 2.6-fold, at least about 2.8-fold, at least about 3-fold, at least about 3.5-fold, at least about 4-fold, at least about 4.5-fold, at least about 5-fold, at least about 6-fold, at least about 7-fold, at least about 8-fold, at least about 9-fold, at least about 10-fold, at least about 20-fold, at least about 30-fold, at least about 40-fold, at least about 50-fold, at least about 100-fold, at least about 200-fold, at least about 300-fold, at least about 400-fold, or at least about 500-fold an infection rate for the non-CNS tissue, as compared to wild type AAV5. In some embodiments, the non-CNS tissue is a liver tissue.

[0273] In some embodiments, the CNS-tropic rAAV assembled from VP capsid polypeptides (e.g., V1, VP2, or VP3 capsid polypeptides, or combinations thereof) comprising a 581-589 region (e.g., any one of SEQ ID NO: 12-SEQ ID NO: 3937 or SEQ ID NO: 3938-SEQ ID NO: 4237, or any 581-589 region adhering to the rules identified herein) may deliver a payload to the tissue infected by the rAAV. The payload (e.g., a payload encoding a therapeutic peptide or a therapeutic polynucleotide) may be expressed in the tissue. In some embodiments, an expression level of the payload in a CNS tissue may be at least about 2.5-fold, at least about 2.8-fold, at least about 3-fold, at least about 3.2-fold, at least about 3.5-fold, at least about 4-fold, at least about 4.5-fold, at least about 5-fold, at least about 6-fold, at least about 7-fold, at least about 8-fold, at least about 9-fold, at least about 10-fold, at least about 20-fold, at least about 50-fold, at least about 75-fold, at least about 100-fold, at least about 200-fold, at least about 500-fold higher, or at least about 1000-fold an expression level in a non-CNS tissue (e.g., a liver tissue). In some embodiments, payload delivery to a CNS tissue using a CNS-tropic AAV may have at least about 1.1-fold, at least about 1.2-fold, at least about 1.3-fold, at least about 1.4-fold, at least about 1.5-fold, at least about 1.6-fold, at least about 1.7-fold, at least about 1.8-fold, at least about 1.9-fold, at least about 2-fold, at least about 2.2-fold, at least about 2.4-fold, at least about 2.6-fold, at least about 2.8-fold, at least about 3-fold, at least about 3.5-fold, at least about 4-fold, at least about 4.5-fold, at least about 5-fold, at least about 6-fold, at least about 7-fold, at least about 8-fold, at least about 9-fold, at least about 10-fold, at least about 20-fold, at least about 30-fold, at least about 40-fold, at least about 50-fold, at least about 100-fold, at least about 200-fold, at least about 300-fold, at least about 400-fold, or at least about 500-fold higher specificity for CNS tissue as compared to a wild type AAV5.

[0274] CNS-Tropic Sequences

[0275] Recombinant AAV viral capsids with specificity for central nervous system (CNS) tissues (CNS-tropic rAAVs) may be identified by screening rAAV libraries comprising VP capsid polypeptides with 581-589 regions, as described herein. The libraries may be screened in non-human primates (NHPs) by systemically administering the rAAV library and identifying sequences of 581-589 regions in VP capsid polypeptides that conferred tissue-tropic accumulation in or infection of CNS tissues (e.g., cortex forebrain, cortex occipital, cortex temporal, thalamus, hypothalamus, substantia nigra, hippocampus DG, hippocampus CA1, hippocampus CA3, cerebellum, or combinations thereof). The CNS-tropic rAAVs may preferentially accumulate in or infect CNS tissues as compared to non-CNS tissues (e.g., liver, skeletal muscle, heart, lung, spleen, lymph node, bone marrow, mammary gland, skin, adrenal gland, thyroid, colon, sciatic nerve, spinal cord, or combinations thereof). Exemplary 581-589 region sequences identified in a primary screen as conferring CNS tissue tropism to an rAAV are provided in TABLE 2 and TABLE 4. Exemplary 581-589 region sequences identified in a secondary screen as conferring CNS tissue tropism to an rAAV are provided in TABLE 9.

[0276] A CNS-tropic rAAV assembled from VP capsid polypeptides (e.g., V1, VP2, or VP3 capsid polypeptides, or combinations thereof) comprising a 581-589 region (e.g., any one of SEQ ID NO: 12-SEQ ID NO: 3937) may preferentially infect a CNS tissue (e.g., cortex forebrain, cortex occipital, cortex temporal, thalamus, hypothalamus, substantia nigra, hippocampus DG, hippocampus CA1, hippocampus CA3, cerebellum, or combinations thereof) as compared to non-CNS tissue (e.g., liver, skeletal muscle, heart, lung, spleen, lymph node, bone marrow, mammary gland, skin, adrenal gland, thyroid, colon, sciatic nerve, spinal cord, or combinations thereof).

[0277] Disclosed herein are engineered AAV5 VP capsid polypeptides capable of forming an assembled virion that exhibits increased central nervous system tissue tropism as compared to a wild type AAV5 VP capsid polypeptide (e.g., a VP1 of SEQ ID NO: 1, a VP2 of SEQ ID NO: 10, or a VP3 of SEQ ID NO: 11), wherein the engineered variant AAV5 VP capsid polypeptide sequence has one or more amino acid substitutions in a 581-589 region of the VP capsid polypeptide, corresponding to positions 581 to 589 in SEQ ID NO: 2 (X¹X²X³X⁴X⁵X⁶X⁷X⁸X⁹). In some embodiments, X¹ is selected from A, R, N, D, C, E, Q, G, H, I, L, K, M, F, P, S, T, W, Y, or V. In some embodiments, X² is selected from A, R, N, D, C, E, Q, G, H, I, L, K, M, F, P, S, T, W, Y, or V. In some embodiments, X³ is selected from A, R, N, D, C, E, Q, G, H, I, L, K, M, F, P, S, T, W, Y, or V. In some embodiments, X⁴ is selected from A, R, N, D, C, E, Q, G, H, I, L, K, M, F, P, S, T, W, Y, or V. In some embodiments, X⁵ is selected from A, R, N, D, C, E, Q, G, H, I, L, K, M, F, P, S, T, W, Y, or V. In some embodiments, X⁶ is selected from A, R, N, D, C, E, Q, G, H, I, L, K, M, F, P, S, T, W, Y, or V. In some embodiments, X⁷ is selected from A, R, N, D, C, E, Q, G, H, I, L, K, M, F, P, S, T, W, Y, or V. In some embodiments, X⁸ is selected A, R, N, D, C, E, Q, G, H, I, L, K, M, F, P, S, T, W, Y, or V. In some embodiments, X⁹ is selected from A, R, N, D, C, E, Q, G, H, I, L, K, M, F, P, S, T, W, Y, or V.

[0278] In some embodiments, a 581-589 region of a CNS tissue-tropic VP capsid polypeptide may comprise a sequence of any one of SEQ ID NO: 12-SEQ ID NO: 3937.

[0279] In some embodiments, provided herein are AAV5 VP capsid polypeptide having at least one mutation in a 581-589 region, corresponding to residues 581 to 589 of AAV5 VP1 (e.g., SEQ ID NO: 1) and having at least 70%, at least 75%, at least 80%, at least 85%, at least 90%, at least 92%, at least 95%, at least 97%, at least 99%, or 100% sequence identity to any sequence selected from SEQ ID NO: 12-SEQ ID NO: 3937, wherein said at least one mutation drives increased central nervous system tissue tropism as compared to a wild type AAV5 capsid polypeptide.

### CNS-Tropic Sequences Generated by Machine Learning

[0280] Additional 581-589 regions that confer CNS tissue tropism may be generated using machine learning algorithms trained with sequence identified in CNS tissue in in vivo screens. These patterns may be used to generate new sequences of 581-589 regions that increase the likelihood of conferring CNS tissue tropism to VP capsid polypeptides and rAAVs assembled from the VP capsid polypeptides. In some embodiments, new sequences of 581-589 regions may be generated by randomly sampling amino acid residues at each position of 581-589 regions that favored CNS tissue tropism in an in vivo screen. The generated sequences may be tested using random forests or gradient boosting classifiers to predicted CNS tissue-specificity for each 581-589 region. The 581-589 regions with the highest predicted CNS tissue-specificity may be selected as CNS tissue-tropic sequences. For example, a 581-589 region of any one of SEQ ID NO: 3938-SEQ ID NO: 4237 may be selected. 581-589 region sequences generated using machine learning for increased likelihood of conferring CNS tissue tropism to an rAAV are provided in TABLE 3.

[0281] Favored amino acid residues and disfavored amino acid residues at each position in the 581-589 region of an engineered AAV5 capsid polypeptide that increase the likelihood of conferring increased CNS tissue tropism as compared to a wild type AAV5 capsid polypeptide may be determined using in vivo data, machine learning (ML) models, or combinations thereof. Recombinant AAV viral capsid libraries may be screened in non-human primates (NHPs) by systemically administering the rAAV library and identifying sequences of 581-589 regions in VP capsid polypeptides that increased the likelihood of conferring tissue-tropic accumulation in or infection of CNS tissues (e.g., cortex forebrain, cortex occipital, cortex temporal, thalamus, hypothalamus, substantia nigra, hippocampus DG, hippocampus CA1, hippocampus CA3, cerebellum, or combinations thereof).

[0282] A CNS-tropic rAAV assembled from VP capsid polypeptides (e.g., V1, VP2, or VP3 capsid polypeptides, or combinations thereof) comprising a 581-589 region may preferentially infect a CNS tissue (e.g., cortex forebrain, cortex occipital, cortex temporal, thalamus, hypothalamus, substantia nigra, hippocampus DG, hippocampus CA1, hippocampus CA3, cerebellum, or combinations thereof) as compared to non-CNS tissue (e.g., liver, skeletal muscle, heart, lung, spleen, lymph node, bone marrow, mammary gland, skin, adrenal gland, thyroid, colon, sciatic nerve, spinal cord, or combinations thereof), as compared to a wild type AAV5 capsid polypeptide.

[0283] Disclosed herein are engineered AAV5 VP capsid polypeptides capable of forming an assembled virion that exhibits increased central nervous system tissue tropism or preference as compared to a wild type AAV5 VP capsid polypeptide (e.g., a VP1 of SEQ ID NO: 1, a VP2 of SEQ ID NO: 10, or a VP3 of SEQ ID NO: 11), wherein the engineered variant AAV5 VP capsid polypeptide sequence has one or more amino acid substitutions in a 581-589 region of the VP capsid polypeptide, corresponding to positions 581 to 589 in SEQ ID NO: 2 (X¹X²X³X⁴X⁵X⁶X⁷X⁸X⁹). In some embodiments, X¹ is selected from A, R, N, D, C, E, Q, G, H, I, L, K, M, F, P, S, T, W, Y, or V. In some embodiments, X² is selected from A, R, N, D, C, E, Q, G, H, I, L, K, M, F, P, S, T, W, Y, or V. In some embodiments, X³ is selected from A, R, N, D, C, E, Q, G, H, I, L, K, M, F, P, S, T, W, Y, or V. In some embodiments, X⁴ is selected from A, R, N, D, C, E, Q, G, H, I, L, K, M, F, P, S, T, W, Y, or V. In some embodiments, X⁵ is selected from A, R, N, D, C, E, Q, G, H, I, L, K, M, F, P, S, T, W, Y, or V. In some embodiments, X⁶ is selected from A, R, N, D, C, E, Q, G, H, I, L, K, M, F, P, S, T, W, Y, or V. In some embodiments, X⁷ is selected from A, R, N, D, C, E, Q, G, H, I, L, K, M, F, P, S, T, W, Y, or V. In some embodiments, X⁸ is selected A, R, N, D, C, E, Q, G, H, I, L, K, M, F, P, S, T, W, Y, or V. In some embodiments, X⁹ is selected from A, R, N, D, C, E, Q, G, H, I, L, K, M, F, P, S, T, W, Y, or V.

[0284] In some embodiments, a 581-589 region of a CNS tissue-tropic VP capsid polypeptide may comprise a sequence of any one of SEQ ID NO: 3938-SEQ ID NO: 4237.

[0285] In some embodiments, provided herein are AAV5 VP capsid polypeptide having at least one mutation in a 581-589 region, corresponding to residues 581 to 589 of AAV5 VP1 (e.g., SEQ ID NO: 1) and having at least 70%, at least 75%, at least 80%, at least 85%, at least 90%, at least 92%, at least 95%, at least 97%, at least 99%, or 100% sequence identity to any sequence selected from SEQ ID NO: 3938-SEQ ID NO: 4237, wherein said at least one mutation drives increased central nervous system tissue tropism as compared to a wild type AAV5 capsid polypeptide.

[0286] The present disclosure provides a tissue-tropic rAAV comprising a VP capsid polypeptide with a 581-589 variant region, relative to WT AAV5, of SEQ ID NO: 18. The present disclosure provides a tissue-tropic rAAV comprising a VP capsid polypeptide with a 581-589 variant region, relative to WT AAV5, of SEQ ID NO: 54. The present disclosure provides a tissue-tropic rAAV comprising a VP capsid polypeptide with a 581-589 variant region, relative to WT AAV5, of SEQ ID NO: 2028. The present disclosure provides a tissue-tropic rAAV comprising a VP capsid polypeptide with a 581-589 variant region, relative to WT AAV5, of SEQ ID NO: 424. The present disclosure provides a tissue-tropic rAAV comprising a VP capsid polypeptide with a 581-589 variant region, relative to WT AAV5, of SEQ ID NO: 3306. The present disclosure provides a tissue-tropic rAAV comprising a VP capsid polypeptide with a 581-589 variant region, relative to WT AAV5, of SEQ ID NO: 3472. The present disclosure provides a tissue-tropic rAAV comprising a VP capsid polypeptide with a 581-589 variant region, relative to WT AAV5, of SEQ ID NO: 415. The present disclosure provides a tissue-tropic rAAV comprising a VP capsid polypeptide with a 581-589 variant region, relative to WT AAV5, of SEQ ID NO: 709. The present disclosure provides a tissue-tropic rAAV comprising a VP capsid polypeptide with a 581-589 variant region, relative to WT AAV5, of SEQ ID NO: 1971. The present disclosure provides a tissue-tropic rAAV comprising a VP capsid polypeptide with a 581-589 variant region, relative to WT AAV5, of SEQ ID NO: 2791. The present disclosure provides a tissue-tropic rAAV comprising a VP capsid polypeptide with a 581-589 variant region, relative to WT AAV5, of SEQ ID NO: 1956. The present disclosure provides a tissue-tropic rAAV comprising a VP capsid polypeptide with a 581-589 variant region, relative to WT AAV5, of SEQ ID NO: 262. The present disclosure provides a tissue-tropic rAAV comprising a VP capsid polypeptide with a 581-589 variant region, relative to WT AAV5, of SEQ ID NO: 425. The present disclosure provides a tissue-tropic rAAV comprising a VP capsid polypeptide with a 581-589 variant region, relative to WT AAV5, of SEQ ID NO: 2536. The present disclosure provides a tissue-tropic rAAV comprising a VP capsid polypeptide with a 581-589 variant region, relative to WT AAV5, of SEQ ID NO: 708. The present disclosure provides a tissue-tropic rAAV comprising a VP capsid polypeptide with a 581-589 variant region, relative to WT AAV5, of SEQ ID NO: 3283. The present disclosure provides a tissue-tropic rAAV comprising a VP capsid polypeptide with a 581-589 variant region, relative to WT AAV5, of SEQ ID NO: 430. The present disclosure provides a tissue-tropic rAAV comprising a VP capsid polypeptide with a 581-589 variant region, relative to WT AAV5, of SEQ ID NO: 3297. The present disclosure provides a tissue-tropic rAAV comprising a VP capsid polypeptide with a 581-589 variant region, relative to WT AAV5, of SEQ ID NO: 2661. The present disclosure provides a tissue-tropic rAAV comprising a VP capsid polypeptide with a 581-589 variant region, relative to WT AAV5, of SEQ ID NO: 428. The present disclosure provides a tissue-tropic rAAV comprising a VP capsid polypeptide with a 581-589 variant region, relative to WT AAV5, of SEQ ID NO: 885. The present disclosure provides a tissue-tropic rAAV comprising a VP capsid polypeptide with a 581-589 variant region, relative to WT AAV5, of SEQ ID NO: 429. The present disclosure provides a tissue-tropic rAAV comprising a VP capsid polypeptide with a 581-589 variant region, relative to WT AAV5, of SEQ ID NO: 569. The present disclosure provides a tissue-tropic rAAV comprising a VP capsid polypeptide with a 581-589 variant region, relative to WT AAV5, of SEQ ID NO: 724. The present disclosure provides a tissue-tropic rAAV comprising a VP capsid polypeptide with a 581-589 variant region, relative to WT AAV5, of SEQ ID NO: 1576. The present disclosure provides a tissue-tropic rAAV comprising a VP capsid polypeptide with a 581-589 variant region, relative to WT AAV5, of SEQ ID NO: 4545. The present disclosure provides a tissue-tropic rAAV comprising a VP capsid polypeptide with a 581-589 variant region, relative to WT AAV5, of SEQ ID NO: 426. The present disclosure provides a tissue-tropic rAAV comprising a VP capsid polypeptide with a 581-589 variant region, relative to WT AAV5, of SEQ ID NO: 1887. The present disclosure provides a tissue-tropic rAAV comprising a VP capsid polypeptide with a 581-589 variant region, relative to WT AAV5, of SEQ ID NO: 3906. The present disclosure provides a tissue-tropic rAAV comprising a VP capsid polypeptide with a 581-589 variant region, relative to WT AAV5, of SEQ ID NO: 3935. The present disclosure provides a tissue-tropic rAAV comprising a VP capsid polypeptide with a 581-589 variant region, relative to WT AAV5, of SEQ ID NO: 3846. The present disclosure provides a tissue-tropic rAAV comprising a VP capsid polypeptide with a 581-589 variant region, relative to WT AAV5, of SEQ ID NO: 2168. The present disclosure provides a tissue-tropic rAAV comprising a VP capsid polypeptide with a 581-589 variant region, relative to WT AAV5, of SEQ ID NO: 4119. The present disclosure provides a tissue-tropic rAAV comprising a VP capsid polypeptide with a 581-589 variant region, relative to WT AAV5, of SEQ ID NO: 2456. The present disclosure provides a tissue-tropic rAAV comprising a VP capsid polypeptide with a 581-589 variant region, relative to WT AAV5, of SEQ ID NO: 2278. The present disclosure provides a tissue-tropic rAAV comprising a VP capsid polypeptide with a 581-589 variant region, relative to WT AAV5, of SEQ ID NO: 5006. The present disclosure provides a tissue-tropic rAAV comprising a VP capsid polypeptide with a 581-589 variant region, relative to WT AAV5, of SEQ ID NO: 307. The present disclosure provides a tissue-tropic rAAV comprising a VP capsid polypeptide with a 581-589 variant region, relative to WT AAV5, of SEQ ID NO: 5155. The present disclosure provides a tissue-tropic rAAV comprising a VP capsid polypeptide with a 581-589 variant region, relative to WT AAV5, of SEQ ID NO: 2640. The present disclosure provides a tissue-tropic rAAV comprising a VP capsid polypeptide with a 581-589 variant region, relative to WT AAV5, of SEQ ID NO: 4317. The present disclosure provides a tissue-tropic rAAV comprising a VP capsid polypeptide with a 581-589 variant region, relative to WT AAV5, of SEQ ID NO: 1145. The present disclosure provides a tissue-tropic rAAV comprising a VP capsid polypeptide with a 581-589 variant region, relative to WT AAV5, of SEQ ID NO: 23. The present disclosure provides a tissue-tropic rAAV comprising a VP capsid polypeptide with a 581-589 variant region, relative to WT AAV5, of SEQ ID NO: 103. The present disclosure provides a tissue-tropic rAAV comprising a VP capsid polypeptide with a 581-589 variant region, relative to WT AAV5, of SEQ ID NO: 22. The present disclosure provides a tissue-tropic rAAV comprising a VP capsid polypeptide with a 581-589 variant region, relative to WT AAV5, of SEQ ID NO: 4031. The present disclosure provides a tissue-tropic rAAV comprising a VP capsid polypeptide with a 581-589 variant region, relative to WT AAV5, of SEQ ID NO: 1008. The present disclosure provides a tissue-tropic rAAV comprising a VP capsid polypeptide with a 581-589 variant region, relative to WT AAV5, of SEQ ID NO: 4790. The present disclosure provides a tissue-tropic rAAV comprising a VP capsid polypeptide with a 581-589 variant region, relative to WT AAV5, of SEQ ID NO: 2522. The present disclosure provides a tissue-tropic rAAV comprising a VP capsid polypeptide with a 581-589 variant region, relative to WT AAV5, of SEQ ID NO: 1432. The present disclosure provides a tissue-tropic rAAV comprising a VP capsid polypeptide with a 581-589 variant region, relative to WT AAV5, of SEQ ID NO: 2914. The present disclosure provides a tissue-tropic rAAV comprising a VP capsid polypeptide with a 581-589 variant region, relative to WT AAV5, of SEQ ID NO: 5042. The present disclosure provides a tissue-tropic rAAV comprising a VP capsid polypeptide with a 581-589 variant region, relative to WT AAV5, of SEQ ID NO: 2865. The present disclosure provides a tissue-tropic rAAV comprising a VP capsid polypeptide with a 581-589 variant region, relative to WT AAV5, of SEQ ID NO: 4264. The present disclosure provides a tissue-tropic rAAV comprising a VP capsid polypeptide with a 581-589 variant region, relative to WT AAV5, of SEQ ID NO: 964. The present disclosure provides a tissue-tropic rAAV comprising a VP capsid polypeptide with a 581-589 variant region, relative to WT AAV5, of SEQ ID NO: 1268. The present disclosure provides a tissue-tropic rAAV comprising a VP capsid polypeptide with a 581-589 variant region, relative to WT AAV5, of SEQ ID NO: 5065. The present disclosure provides a tissue-tropic rAAV comprising a VP capsid polypeptide with a 581-589 variant region, relative to WT AAV5, of SEQ ID NO: 706. The present disclosure provides a tissue-tropic rAAV comprising a VP capsid polypeptide with a 581-589 variant region, relative to WT AAV5, of SEQ ID NO: 4704. The present disclosure provides a tissue-tropic rAAV comprising a VP capsid polypeptide with a 581-589 variant region, relative to WT AAV5, of SEQ ID NO: 2994. The present disclosure provides a tissue-tropic rAAV comprising a VP capsid polypeptide with a 581-589 variant region, relative to WT AAV5, of SEQ ID NO: 829. The present disclosure provides a tissue-tropic rAAV comprising a VP capsid polypeptide with a 581-589 variant region, relative to WT AAV5, of SEQ ID NO: 1171. The present disclosure provides a tissue-tropic rAAV comprising a VP capsid polypeptide with a 581-589 variant region, relative to WT AAV5, of SEQ ID NO: 1041. The present disclosure provides a tissue-tropic rAAV comprising a VP capsid polypeptide with a 581-589 variant region, relative to WT AAV5, of SEQ ID NO: 5070. The present disclosure provides a tissue-tropic rAAV comprising a VP capsid polypeptide with a 581-589 variant region, relative to WT AAV5, of SEQ ID NO: 139. The present disclosure provides a tissue-tropic rAAV comprising a VP capsid polypeptide with a 581-589 variant region, relative to WT AAV5, of SEQ ID NO: 3304. The present disclosure provides a tissue-tropic rAAV comprising a VP capsid polypeptide with a 581-589 variant region, relative to WT AAV5, of SEQ ID NO: 2431. The present disclosure provides a tissue-tropic rAAV comprising a VP capsid polypeptide with a 581-589 variant region, relative to WT AAV5, of SEQ ID NO: 4288. The present disclosure provides a tissue-tropic rAAV comprising a VP capsid polypeptide with a 581-589 variant region, relative to WT AAV5, of SEQ ID NO: 5795. The present disclosure provides a tissue-tropic rAAV comprising a VP capsid polypeptide with a 581-589 variant region, relative to WT AAV5, of SEQ ID NO: 1300. The present disclosure provides a tissue-tropic rAAV comprising a VP capsid polypeptide with a 581-589 variant region, relative to WT AAV5, of SEQ ID NO: 1770. The present disclosure provides a tissue-tropic rAAV comprising a VP capsid polypeptide with a 581-589 variant region, relative to WT AAV5, of SEQ ID NO: 2830. The present disclosure provides a tissue-tropic rAAV comprising a VP capsid polypeptide with a 581-589 variant region, relative to WT AAV5, of SEQ ID NO: 1972. The present disclosure provides a tissue-tropic rAAV comprising a VP capsid polypeptide with a 581-589 variant region, relative to WT AAV5, of SEQ ID NO: 1649. The present disclosure provides a tissue-tropic rAAV comprising a VP capsid polypeptide with a 581-589 variant region, relative to WT AAV5, of SEQ ID NO: 2515. The present disclosure provides a tissue-tropic rAAV comprising a VP capsid polypeptide with a 581-589 variant region, relative to WT AAV5, of SEQ ID NO: 2849. The present disclosure provides a tissue-tropic rAAV comprising a VP capsid polypeptide with a 581-589 variant region, relative to WT AAV5, of SEQ ID NO: 3796. The present disclosure provides a tissue-tropic rAAV comprising a VP capsid polypeptide with a 581-589 variant region, relative to WT AAV5, of SEQ ID NO: 5815 (SYKMIHNTA). The present disclosure provides a tissue-tropic rAAV comprising a VP capsid polypeptide with a 581-589 variant region, relative to WT AAV5, of SEQ ID NO: 118. The present disclosure provides a tissue-tropic rAAV comprising a VP capsid polypeptide with a 581-589 variant region, relative to WT AAV5, of SEQ ID NO: 4766. The present disclosure provides a tissue-tropic rAAV comprising a VP capsid polypeptide with a 581-589 variant region, relative to WT AAV5, of SEQ ID NO: 770. The present disclosure provides a tissue-tropic rAAV comprising a VP capsid polypeptide with a 581-589 variant region, relative to WT AAV5, of SEQ ID NO: 1069. The present disclosure provides a tissue-tropic rAAV comprising a VP capsid polypeptide with a 581-589 variant region, relative to WT AAV5, of SEQ ID NO: 3061. The present disclosure provides a tissue-tropic rAAV comprising a VP capsid polypeptide with a 581-589 variant region, relative to WT AAV5, of SEQ ID NO: 4290. The present disclosure provides a tissue-tropic rAAV comprising a VP capsid polypeptide with a 581-589 variant region, relative to WT AAV5, of SEQ ID NO: 4261. The present disclosure provides a tissue-tropic rAAV comprising a VP capsid polypeptide with a 581-589 variant region, relative to WT AAV5, of SEQ ID NO: 4239. The present disclosure provides a tissue-tropic rAAV comprising a VP capsid polypeptide with a 581-589 variant region, relative to WT AAV5, of SEQ ID NO: 3478. The present disclosure provides a tissue-tropic rAAV comprising a VP capsid polypeptide with a 581-589 variant region, relative to WT AAV5, of SEQ ID NO: 2671. The present disclosure provides a tissue-tropic rAAV comprising a VP capsid polypeptide with a 581-589 variant region, relative to WT AAV5, of SEQ ID NO: 256. The present disclosure provides a tissue-tropic rAAV comprising a VP capsid polypeptide with a 581-589 variant region, relative to WT AAV5, of SEQ ID NO: 1256. The present disclosure provides a tissue-tropic rAAV comprising a VP capsid polypeptide with a 581-589 variant region, relative to WT AAV5, of SEQ ID NO: 719. The present disclosure provides a tissue-tropic rAAV comprising a VP capsid polypeptide with a 581-589 variant region, relative to WT AAV5, of SEQ ID NO: 1448. The present disclosure provides a tissue-tropic rAAV comprising a VP capsid polypeptide with a 581-589 variant region, relative to WT AAV5, of SEQ ID NO: 280. The present disclosure provides a tissue-tropic rAAV comprising a VP capsid polypeptide with a 581-589 variant region, relative to WT AAV5, of SEQ ID NO: 4338. The present disclosure provides a tissue-tropic rAAV comprising a VP capsid polypeptide with a 581-589 variant region, relative to WT AAV5, of SEQ ID NO: 5037. The present disclosure provides a tissue-tropic rAAV comprising a VP capsid polypeptide with a 581-589 variant region, relative to WT AAV5, of SEQ ID NO: 1901. The present disclosure provides a tissue-tropic rAAV comprising a VP capsid polypeptide with a 581-589 variant region, relative to WT AAV5, of SEQ ID NO: 438. The present disclosure provides a tissue-tropic rAAV comprising a VP capsid polypeptide with a 581-589 variant region, relative to WT AAV5, of SEQ ID NO: 2834. The present disclosure provides a tissue-tropic rAAV comprising a VP capsid polypeptide with a 581-589 variant region, relative to WT AAV5, of SEQ ID NO: 5491. The present disclosure provides a tissue-tropic rAAV comprising a VP capsid polypeptide with a 581-589 variant region, relative to WT AAV5, of SEQ ID NO: 4591. The present disclosure provides a tissue-tropic rAAV comprising a VP capsid polypeptide with a 581-589 variant region, relative to WT AAV5, of SEQ ID NO: 4936.

### Variant 581-589 Regions for CNS Targeting

[0287] In some embodiments, provided herein are AAV5 VP capsid polypeptide having at least one mutation in a 581-589 region, corresponding to residues 581 to 589 of AAV5 VP1, and having at least 70%, at least 75%, at least 80%, at least 85%, at least 90%, at least 92%, at least 95%, at least 97%, at least 99%, or 100% sequence identity to any sequence selected from SEQ ID NO: 12-SEQ ID NO: 3937, SEQ ID NO: 3938-SEQ ID NO: 4237, or SEQ ID NO: 5234-SEQ ID NO: 5807, wherein said at least one mutation drives increased CNS tissue tropism as compared to a wild type AAV5 capsid polypeptide.

### Variant 581-589 Regions for Muscle Tissue Tropism

[0288] The present disclosure provides AAV5 virions with a VP capsid polypeptide having at least one mutation in a region with residues that interact with target cells (e.g., a target muscle cell in a target muscle tissue of interest), where the at least one mutation confers increased muscle tissue tropism or preference as compared to a wild type VP capsid polypeptide (e.g., a VP capsid polypeptide of SEQ ID NO: 1, SEQ ID NO: 10, or SEQ ID NO: 11). In some embodiments, provided herein are AAV5 VP1 capsid polypeptide having a sequence homology of at least 80% to SEQ ID NO: 1, wherein the AAV5 VP1 capsid polypeptide has at least one mutation in a 581-589 region, corresponding to residues 581 to 589 of SEQ ID NO: 1, and wherein said at least one mutation drives increased muscle tropism or preference as compared to the wild type VP capsid polypeptide of SEQ ID NO: 1. The following sequences rules and sequences also apply to the 581-589 region in AAV5 VP2 (amino acid residues 445 to 453; VP2 sequence shown in SEQ ID NO: 10) and in AAV5 VP3 (amino acid residues 389 to 397; VP3 sequences shown in SEQ ID NO: 11). Thus, the present disclosure encompasses AAV5 VP2 capsid polypeptides and AAV5 VP3 capsid polypeptides having one or more amino acid substitutions in the 581-589 regions of VP2 and VP3, corresponding to the AAV5 VP1 amino acid residues of the 581 to 589, where the one or more mutations comport to the rules or sequences in the following section.

[0289] VP capsid polypeptides (e.g., V1, VP2, or VP3 capsid polypeptides, or combinations thereof) comprising a muscle-tropic 581-589 region (e.g., any one of SEQ ID NO: 4238-SEQ ID NO: 4933 or SEQ ID NO: 4934-SEQ ID NO: 5233, or any 581-589 region adhering to the rules identified herein) may assemble to form an rAAV with altered surface properties compared to a wild type AAV (e.g., comprising a VP1 polypeptide of SEQ ID NO: 1). The surface may form an interface that forms interactions with a target tissue, and the altered surface properties of the rAAV may promote tissue specific interactions (e.g., muscle-specific interactions) between the rAAV and the target tissue.

[0290] A muscle-tropic rAAV assembled from VP capsid polypeptides (e.g., V1, VP2, or VP3 capsid polypeptides, or combinations thereof) comprising a 581-589 region (e.g., any one of SEQ ID NO: 4238-SEQ ID NO: 4933 or SEQ ID NO: 4934-SEQ ID NO: 5233, or any 581-589 region adhering to the rules identified herein) may preferentially infect a muscle tissue (e.g., aorta, esophagus, heart (including atrium, ventricle, valves), skeletal muscle (including biceps, brachii, femoris, diaphragm, gastrocnemius, tibialis anterior, triceps, quadriceps, including vastus lateralis)), or muscle fibers (e.g., type I (slow oxidative) fibers, type IC fibers, type II fibers, type IIC fibers, type IIA (fast oxidative/glycolytic) fibers, type IIAX fibers, type IIXA fibers, type IIX (fast glycolytic) fibers, or combinations thereof) as compared to non-muscle tissue (e.g., liver, CNS, heart, lung, spleen, lymph node, bone marrow, mammary gland, skin, adrenal gland, thyroid, colon, sciatic nerve, spinal cord, or combinations thereof) at a higher level as compared to wild type AAV5. The muscle-tropic AAV may infect the muscle tissue at a rate that is at least about 1.1-fold, at least about 1.2-fold, at least about 1.3-fold, at least about 1.4-fold, at least about 1.5-fold, at least about 1.6-fold, at least about 1.7-fold, at least about 1.8-fold, at least about 1.9-fold, at least about 2-fold, at least about 2.2-fold, at least about 2.4-fold, at least about 2.6-fold, at least about 2.8-fold, at least about 3-fold, at least about 3.5-fold, at least about 4-fold, at least about 4.5-fold, at least about 5-fold, at least about 6-fold, at least about 7-fold, at least about 8-fold, at least about 9-fold, at least about 10-fold, at least about 20-fold, at least about 30-fold, at least about 40-fold, at least about 50-fold, at least about 100-fold, at least about 200-fold, at least about 300-fold, at least about 400-fold, or at least about 500-fold an infection rate for the non-muscle tissue, as compared to wild type AAV5. In some embodiments, the non-muscle tissue is a liver tissue.

[0291] In some embodiments, the muscle-tropic rAAV assembled from VP capsid polypeptides (e.g., V1, VP2, or VP3 capsid polypeptides, or combinations thereof) comprising a 581-589 region (e.g., any one of SEQ ID NO: 4238-SEQ ID NO: 4933 or SEQ ID NO: 4934-SEQ ID NO: 5233, or any 581-589 region adhering to the rules identified herein) may deliver a payload to the tissue infected by the rAAV. The payload (e.g., a payload encoding a therapeutic peptide or a therapeutic polynucleotide) may be expressed in the tissue. In some embodiments, an expression level of the payload in a muscle tissue may be at least about 2.5-fold, at least about 2.8-fold, at least about 3-fold, at least about 3.2-fold, at least about 3.5-fold, at least about 4-fold, at least about 4.5-fold, at least about 5-fold, at least about 6-fold, at least about 7-fold, at least about 8-fold, at least about 9-fold, at least about 10-fold, at least about 20-fold, at least about 50-fold, at least about 75-fold, at least about 100-fold, at least about 200-fold, at least about 500-fold higher, or at least about 1000-fold an expression level in a non-muscle tissue (e.g., a liver tissue). In some embodiments, payload delivery to a muscle tissue using a CNS-tropic AAV may have at least about 1.1-fold, at least about 1.2-fold, at least about 1.3-fold, at least about 1.4-fold, at least about 1.5-fold, at least about 1.6-fold, at least about 1.7-fold, at least about 1.8-fold, at least about 1.9-fold, at least about 2-fold, at least about 2.2-fold, at least about 2.4-fold, at least about 2.6-fold, at least about 2.8-fold, at least about 3-fold, at least about 3.5-fold, at least about 4-fold, at least about 4.5-fold, at least about 5-fold, at least about 6-fold, at least about 7-fold, at least about 8-fold, at least about 9-fold, at least about 10-fold, at least about 20-fold, at least about 30-fold, at least about 40-fold, at least about 50-fold, at least about 100-fold, at least about 200-fold, at least about 300-fold, at least about 400-fold, or at least about 500-fold higher specificity for muscle tissue as compared to a wild type AAV5.

### Muscle-Tropic Sequences

[0292] Recombinant AAV viral capsids with specificity for muscle tissue (muscle-tropic rAAVs) may be identified by screening rAAV libraries comprising VP capsid polypeptides with variant 581-589 regions, as described herein. The libraries may be screened in non-human primates (NHPs) by systemically administering the rAAV library and identifying sequences of 581-589 regions in VP capsid polypeptides that conferred tissue-tropic accumulation in or infection of muscle tissues (e.g., aorta, esophagus, heart (including atrium, ventricle, valves), skeletal muscle (including biceps, brachii, femoris, diaphragm, gastrocnemius, tibialis anterior, triceps, quadriceps, including vastus lateralis)), or muscle fibers (e.g., type I (slow oxidative) fibers, type IC fibers, type II fibers, type IIC fibers, type IIA (fast oxidative/glycolytic) fibers, type IIAX fibers, type IIXA fibers, type IIX (fast glycolytic) fibers, or combinations thereof) to the rAAVs. The muscle-tropic rAAVs may preferentially accumulate in or infect muscle tissues as compared to non-muscle tissues (e.g., liver, CNS, heart, lung, spleen, lymph node, bone marrow, mammary gland, skin, adrenal gland, thyroid, colon, sciatic nerve, spinal cord, or combinations thereof). Exemplary region sequences identified in a primary screen as conferring muscle tropism to an rAAV are provided in TABLE 5 and TABLE 7. Exemplary region sequences identified in a secondary screen as conferring cardiac muscle tropism to an rAAV are provided in TABLE 10. Exemplary region sequences identified in a secondary screen as conferring skeletal muscle tropism to an rAAV are provided in TABLE 11. Exemplary region sequences identified in a secondary screen as conferring muscle tropism to an rAAV are provided in TABLE 12.

[0293] A muscle-tropic rAAV assembled from VP capsid polypeptides (e.g., V1, VP2, or VP3 capsid polypeptides, or combinations thereof) comprising a 581-589 region (e.g., any one of SEQ ID NO: 4238-SEQ ID NO: 4933) may preferentially infect a muscle tissue (e.g., aorta, esophagus, heart (including atrium, ventricle, valves), skeletal muscle (including biceps, brachii, femoris, diaphragm, gastrocnemius, tibialis anterior, triceps, quadriceps, including vastus lateralis)), or muscle fibers (e.g., type I (slow oxidative) fibers, type IC fibers, type II fibers, type IIC fibers, type IIA (fast oxidative/glycolytic) fibers, type IIAX fibers, type IIXA fibers, type IIX (fast glycolytic) fibers, or combinations thereof) as compared to non-muscle tissue (e.g., liver, CNS, heart, lung, spleen, lymph node, bone marrow, mammary gland, skin, adrenal gland, thyroid, colon, sciatic nerve, spinal cord, or combinations thereof).

[0294] Disclosed herein are engineered AAV5 VP capsid polypeptides capable of forming an assembled virion that exhibits increased muscle tropism as compared to a wild type AAV5 VP capsid polypeptide (e.g., a VP1 of SEQ ID NO: 1, a VP2 of SEQ ID NO: 10, or a VP3 of SEQ ID NO: 11), wherein the engineered variant AAV5 VP capsid polypeptide sequence has one or more amino acid substitutions in a 581-589 region of the VP capsid polypeptide, corresponding to positions 581 to 589 in SEQ ID NO: 2 (X¹X²X³X⁴X⁵X⁶X⁷X⁸X⁹). In some embodiments, X¹ is selected from A, R, N, D, C, E, Q, G, H, I, L, K, M, F, P, S, T, W, Y, or V. In some embodiments, X² is selected from A, R, N, D, C, E, Q, G, H, I, L, K, M, F, P, S, T, W, Y, or V. In some embodiments, X³ is selected from A, R, N, D, C, E, Q, G, H, I, L, K, M, F, P, S, T, W, Y, or V. In some embodiments, X⁴ is selected from A, R, N, D, C, E, Q, G, H, I, L, K, M, F, P, S, T, W, Y, or V. In some embodiments, X⁵ is selected from A, R, N, D, C, E, Q, G, H, I, L, K, M, F, P, S, T, W, Y, or V. In some embodiments, X⁶ is selected from A, R, N, D, C, E, Q, G, H, I, L, K, M, F, P, S, T, W, Y, or V. In some embodiments, X⁷ is selected from A, R, N, D, C, E, Q, G, H, I, L, K, M, F, P, S, T, W, Y, or V. In some embodiments, X⁸ is selected A, R, N, D, C, E, Q, G, H, I, L, K, M, F, P, S, T, W, Y, or V. In some embodiments, X⁹ is selected from A, R, N, D, C, E, Q, G, H, I, L, K, M, F, P, S, T, W, Y, or V.

[0295] In some embodiments, a 581-589 region of a muscle-tropic VP capsid polypeptide may comprise a sequence of any one of SEQ ID NO: 4238-SEQ ID NO: 4933.

[0296] In some embodiments, provided herein are AAV5 VP capsid polypeptide having at least one mutation in a 581-589 region, corresponding to residues 581 to 589 of AAV5 VP1 (e.g., SEQ ID NO: 1) and having at least 70%, at least 75%, at least 80%, at least 85%, at least 90%, at least 92%, at least 95%, at least 97%, at least 99%, or 100% sequence identity to any sequence selected from SEQ ID NO: 4238-SEQ ID NO: 4933, wherein said at least one mutation drives increased muscle tissue tropism as compared to a wild type AAV5 capsid polypeptide.

### Muscle-Tropic Sequences Generated by Machine Learning

[0297] Additional 581-589 regions that confer muscle tissue tropism or preference may be generated using machine learning algorithms trained with sequence identified in muscle tissue in in vivo screens. These patterns may be used to generate new sequences of 581-589 regions that increase the likelihood of conferring muscle tissue tropism to VP capsid polypeptides and rAAVs assembled from the VP capsid polypeptides. In some embodiments, new sequences of 581-589 regions may be generated by randomly sampling amino acid residues at each position of 581-589 regions that favored muscle tissue tropism in an in vivo screen. The generated sequences may be tested using random forests or gradient boosting classifiers to predicted muscle-specificity for each 581-589 region. The 581-589 regions with the highest predicted muscle-specificity may be selected as muscle-tropic sequences. For example, a 581-589 region of any one of SEQ ID NO: 4934-SEQ ID NO: 5233 may be selected. 581-589 region sequences generated using machine learning for increased likelihood of conferring muscle tropism to an rAAV are provided in TABLE 6.

[0298] Recombinant AAV viral capsids libraries may be screened in non-human primates (NHPs) by systemically administering the rAAV library and identifying sequences of 581-589 regions in VP capsid polypeptides that increased the likelihood of conferring tissue-tropic accumulation in or infection of muscle tissues (e.g., aorta, esophagus, heart (including atrium, ventricle, valves), skeletal muscle (including biceps, brachii, femoris, diaphragm, gastrocnemius, tibialis anterior, triceps, quadriceps, including vastus lateralis)), or muscle fibers (e.g., type I (slow oxidative) fibers, type IC fibers, type II fibers, type IIC fibers, type IIA (fast oxidative/glycolytic) fibers, type IIAX fibers, type IIXA fibers, type IIX (fast glycolytic) fibers, or combinations thereof.

[0299] A muscle-tropic rAAV assembled from VP capsid polypeptides (e.g., V1, VP2, or VP3 capsid polypeptides, or combinations thereof) comprising a 581-589 region may preferentially infect a muscle tissue (e.g., aorta, esophagus, heart (including atrium, ventricle, valves), skeletal muscle (including biceps, brachii, femoris, diaphragm, gastrocnemius, tibialis anterior, triceps, quadriceps, including vastus lateralis)), or muscle fibers (e.g., type I (slow oxidative) fibers, type IC fibers, type II fibers, type IIC fibers, type IIA (fast oxidative/glycolytic) fibers, type IIAX fibers, type IIXA fibers, type IIX (fast glycolytic) fibers, or combinations thereof) as compared to non-muscle tissue (e.g., liver, CNS, heart, lung, spleen, lymph node, bone marrow, mammary gland, skin, adrenal gland, thyroid, colon, sciatic nerve, spinal cord, or combinations thereof), as compared to a wild type AAV5 capsid polypeptide.

[0300] Disclosed herein are engineered AAV5 VP capsid polypeptides capable of forming an assembled virion that exhibits increased muscle tissue tropism as compared to a wild type AAV5 VP capsid polypeptide (e.g., a VP1 of SEQ ID NO: 1, a VP2 of SEQ ID NO: 10, or a VP3 of SEQ ID NO: 11), wherein the engineered variant AAV5 VP capsid polypeptide sequence has one or more amino acid substitutions in a 581-589 region of the VP capsid polypeptide, corresponding to positions 581 to 589 in SEQ ID NO: 2 (X¹X²X³X⁴X⁵X⁶X⁷X⁸X⁹). In some embodiments, X¹ is selected from A, R, N, D, C, E, Q, G, H, I, L, K, M, F, P, S, T, W, Y, or V. In some embodiments, X² is selected from A, R, N, D, C, E, Q, G, H, I, L, K, M, F, P, S, T, W, Y, or V. In some embodiments, X³ is selected from A, R, N, D, C, E, Q, G, H, I, L, K, M, F, P, S, T, W, Y, or V. In some embodiments, X⁴ is selected from A, R, N, D, C, E, Q, G, H, I, L, K, M, F, P, S, T, W, Y, or V. In some embodiments, X⁵ is selected from A, R, N, D, C, E, Q, G, H, I, L, K, M, F, P, S, T, W, Y, or V. In some embodiments, X⁶ is selected from A, R, N, D, C, E, Q, G, H, I, L, K, M, F, P, S, T, W, Y, or V. In some embodiments, X⁷ is selected from A, R, N, D, C, E, Q, G, H, I, L, K, M, F, P, S, T, W, Y, or V. In some embodiments, X⁸ is selected A, R, N, D, C, E, Q, G, H, I, L, K, M, F, P, S, T, W, Y, or V. In some embodiments, X⁹ is selected from A, R, N, D, C, E, Q, G, H, I, L, K, M, F, P, S, T, W, Y, or V.

[0301] In some embodiments, a 581-589 region of a muscle-tropic VP capsid polypeptide may comprise a sequence of any one of SEQ ID NO: 4934-SEQ ID NO: 5233.

[0302] In some embodiments, provided herein are AAV5 VP capsid polypeptide having at least one mutation in a 581-589 region, corresponding to residues 581 to 589 of AAV5 VP1 (e.g., SEQ ID NO: 1) and having at least 70%, at least 75%, at least 80%, at least 85%, at least 90%, at least 92%, at least 95%, at least 97%, at least 99%, or 100% sequence identity to any sequence selected from SEQ ID NO: 4934-SEQ ID NO: 5233, wherein said at least one mutation drives increased muscle tissue tropism as compared to a wild type AAV5 capsid polypeptide.

### Variant 581-589 Regions for Muscle Targeting

[0303] In some embodiments, provided herein are AAV5 VP capsid polypeptide having at least one mutation in a 581-589 region, corresponding to residues 581 to 589 of AAV5 VP1, and having at least 70%, at least 75%, at least 80%, at least 85%, at least 90%, at least 92%, at least 95%, at least 97%, at least 99%, or 100% sequence identity to any sequence selected from SEQ ID NO: 4238-SEQ ID NO: 4933, SEQ ID NO: 4934-SEQ ID NO: 5233, or SEQ ID NO: 5808-SEQ ID NO: 5811, wherein said at least one mutation drives increased muscle tissue tropism as compared to a wild type AAV5 capsid polypeptide.

[0304] The present disclosure provides a tissue-tropic rAAV comprising a VP capsid polypeptide with a 581-589 variant region, relative to WT AAV5, of SEQ ID NO: 348. The present disclosure provides a tissue-tropic rAAV comprising a VP capsid polypeptide with a 581-589 variant region, relative to WT AAV5, of SEQ ID NO: 2536. The present disclosure provides a tissue-tropic rAAV comprising a VP capsid polypeptide with a 581-589 variant region, relative to WT AAV5, of SEQ ID NO: 5607. The present disclosure provides a tissue-tropic rAAV comprising a VP capsid polypeptide with a 581-589 variant region, relative to WT AAV5, of SEQ ID NO: 1576. The present disclosure provides a tissue-tropic rAAV comprising a VP capsid polypeptide with a 581-589 variant region, relative to WT AAV5, of SEQ ID NO: 4955. The present disclosure provides a tissue-tropic rAAV comprising a VP capsid polypeptide with a 581-589 variant region, relative to WT AAV5, of SEQ ID NO: 5017. The present disclosure provides a tissue-tropic rAAV comprising a VP capsid polypeptide with a 581-589 variant region, relative to WT AAV5, of SEQ ID NO: 4349. The present disclosure provides a tissue-tropic rAAV comprising a VP capsid polypeptide with a 581-589 variant region, relative to WT AAV5, of SEQ ID NO: 4964. The present disclosure provides a tissue-tropic rAAV comprising a VP capsid polypeptide with a 581-589 variant region, relative to WT AAV5, of SEQ ID NO: 293. The present disclosure provides a tissue-tropic rAAV comprising a VP capsid polypeptide with a 581-589 variant region, relative to WT AAV5, of SEQ ID NO: 4314. The present disclosure provides a tissue-tropic rAAV comprising a VP capsid polypeptide with a 581-589 variant region, relative to WT AAV5, of SEQ ID NO: 4995. The present disclosure provides a tissue-tropic rAAV comprising a VP capsid polypeptide with a 581-589 variant region, relative to WT AAV5, of SEQ ID NO: 4366. The present disclosure provides a tissue-tropic rAAV comprising a VP capsid polypeptide with a 581-589 variant region, relative to WT AAV5, of SEQ ID NO: 4961. The present disclosure provides a tissue-tropic rAAV comprising a VP capsid polypeptide with a 581-589 variant region, relative to WT AAV5, of SEQ ID NO: 4952. The present disclosure provides a tissue-tropic rAAV comprising a VP capsid polypeptide with a 581-589 variant region, relative to WT AAV5, of SEQ ID NO: 5075. The present disclosure provides a tissue-tropic rAAV comprising a VP capsid polypeptide with a 581-589 variant region, relative to WT AAV5, of SEQ ID NO: 4354. The present disclosure provides a tissue-tropic rAAV comprising a VP capsid polypeptide with a 581-589 variant region, relative to WT AAV5, of SEQ ID NO: 5060. The present disclosure provides a tissue-tropic rAAV comprising a VP capsid polypeptide with a 581-589 variant region, relative to WT AAV5, of SEQ ID NO: 5138. The present disclosure provides a tissue-tropic rAAV comprising a VP capsid polypeptide with a 581-589 variant region, relative to WT AAV5, of SEQ ID NO: 5206. The present disclosure provides a tissue-tropic rAAV comprising a VP capsid polypeptide with a 581-589 variant region, relative to WT AAV5, of SEQ ID NO: 4288. The present disclosure provides a tissue-tropic rAAV comprising a VP capsid polypeptide with a 581-589 variant region, relative to WT AAV5, of SEQ ID NO: 5283. The present disclosure provides a tissue-tropic rAAV comprising a VP capsid polypeptide with a 581-589 variant region, relative to WT AAV5, of SEQ ID NO: 5092. The present disclosure provides a tissue-tropic rAAV comprising a VP capsid polypeptide with a 581-589 variant region, relative to WT AAV5, of SEQ ID NO: 4059. The present disclosure provides a tissue-tropic rAAV comprising a VP capsid polypeptide with a 581-589 variant region, relative to WT AAV5, of SEQ ID NO: 4295. The present disclosure provides a tissue-tropic rAAV comprising a VP capsid polypeptide with a 581-589 variant region, relative to WT AAV5, of SEQ ID NO: 5030. The present disclosure provides a tissue-tropic rAAV comprising a VP capsid polypeptide with a 581-589 variant region, relative to WT AAV5, of SEQ ID NO: 4938. The present disclosure provides a tissue-tropic rAAV comprising a VP capsid polypeptide with a 581-589 variant region, relative to WT AAV5, of SEQ ID NO: 2661. The present disclosure provides a tissue-tropic rAAV comprising a VP capsid polypeptide with a 581-589 variant region, relative to WT AAV5, of SEQ ID NO: 5215. The present disclosure provides a tissue-tropic rAAV comprising a VP capsid polypeptide with a 581-589 variant region, relative to WT AAV5, of SEQ ID NO: 4960. The present disclosure provides a tissue-tropic rAAV comprising a VP capsid polypeptide with a 581-589 variant region, relative to WT AAV5, of SEQ ID NO: 4969. The present disclosure provides a tissue-tropic rAAV comprising a VP capsid polypeptide with a 581-589 variant region, relative to WT AAV5, of SEQ ID NO: 5023. The present disclosure provides a tissue-tropic rAAV comprising a VP capsid polypeptide with a 581-589 variant region, relative to WT AAV5, of SEQ ID NO: 4934. The present disclosure provides a tissue-tropic rAAV comprising a VP capsid polypeptide with a 581-589 variant region, relative to WT AAV5, of SEQ ID NO: 4545. The present disclosure provides a tissue-tropic rAAV comprising a VP capsid polypeptide with a 581-589 variant region, relative to WT AAV5, of SEQ ID NO: 4963. The present disclosure provides a tissue-tropic rAAV comprising a VP capsid polypeptide with a 581-589 variant region, relative to WT AAV5, of SEQ ID NO: 4363. The present disclosure provides a tissue-tropic rAAV comprising a VP capsid polypeptide with a 581-589 variant region, relative to WT AAV5, of SEQ ID NO: 5159. The present disclosure provides a tissue-tropic rAAV comprising a VP capsid polypeptide with a 581-589 variant region, relative to WT AAV5, of SEQ ID NO: 4973. The present disclosure provides a tissue-tropic rAAV comprising a VP capsid polypeptide with a 581-589 variant region, relative to WT AAV5, of SEQ ID NO: 5157. The present disclosure provides a tissue-tropic rAAV comprising a VP capsid polypeptide with a 581-589 variant region, relative to WT AAV5, of SEQ ID NO: 4972. The present disclosure provides a tissue-tropic rAAV comprising a VP capsid polypeptide with a 581-589 variant region, relative to WT AAV5, of SEQ ID NO: 4345. The present disclosure provides a tissue-tropic rAAV comprising a VP capsid polypeptide with a 581-589 variant region, relative to WT AAV5, of SEQ ID NO: 5039. The present disclosure provides a tissue-tropic rAAV comprising a VP capsid polypeptide with a 581-589 variant region, relative to WT AAV5, of SEQ ID NO: 5163. The present disclosure provides a tissue-tropic rAAV comprising a VP capsid polypeptide with a 581-589 variant region, relative to WT AAV5, of SEQ ID NO: 5040. The present disclosure provides a tissue-tropic rAAV comprising a VP capsid polypeptide with a 581-589 variant region, relative to WT AAV5, of SEQ ID NO: 4304. The present disclosure provides a tissue-tropic rAAV comprising a VP capsid polypeptide with a 581-589 variant region, relative to WT AAV5, of SEQ ID NO: 18. The present disclosure provides a tissue-tropic rAAV comprising a VP capsid polypeptide with a 581-589 variant region, relative to WT AAV5, of SEQ ID NO: 5193. The present disclosure provides a tissue-tropic rAAV comprising a VP capsid polypeptide with a 581-589 variant region, relative to WT AAV5, of SEQ ID NO: 5077. The present disclosure provides a tissue-tropic rAAV comprising a VP capsid polypeptide with a 581-589 variant region, relative to WT AAV5, of SEQ ID NO: 5814. The present disclosure provides a tissue-tropic rAAV comprising a VP capsid polypeptide with a 581-589 variant region, relative to WT AAV5, of SEQ ID NO: 386. The present disclosure provides a tissue-tropic rAAV comprising a VP capsid polypeptide with a 581-589 variant region, relative to WT AAV5, of SEQ ID NO: 5081. The present disclosure provides a tissue-tropic rAAV comprising a VP capsid polypeptide with a 581-589 variant region, relative to WT AAV5, of SEQ ID NO: 308. The present disclosure provides a tissue-tropic rAAV comprising a VP capsid polypeptide with a 581-589 variant region, relative to WT AAV5, of SEQ ID NO: 22. The present disclosure provides a tissue-tropic rAAV comprising a VP capsid polypeptide with a 581-589 variant region, relative to WT AAV5, of SEQ ID NO: 4338. The present disclosure provides a tissue-tropic rAAV comprising a VP capsid polypeptide with a 581-589 variant region, relative to WT AAV5, of SEQ ID NO: 3846. The present disclosure provides a tissue-tropic rAAV comprising a VP capsid polypeptide with a 581-589 variant region, relative to WT AAV5, of SEQ ID NO: 278. The present disclosure provides a tissue-tropic rAAV comprising a VP capsid polypeptide with a 581-589 variant region, relative to WT AAV5, of SEQ ID NO: 5127. The present disclosure provides a tissue-tropic rAAV comprising a VP capsid polypeptide with a 581-589 variant region, relative to WT AAV5, of SEQ ID NO: 5029. The present disclosure provides a tissue-tropic rAAV comprising a VP capsid polypeptide with a 581-589 variant region, relative to WT AAV5, of SEQ ID NO: 5037. The present disclosure provides a tissue-tropic rAAV comprising a VP capsid polypeptide with a 581-589 variant region, relative to WT AAV5, of SEQ ID NO: 5143. The present disclosure provides a tissue-tropic rAAV comprising a VP capsid polypeptide with a 581-589 variant region, relative to WT AAV5, of SEQ ID NO: 4983. The present disclosure provides a tissue-tropic rAAV comprising a VP capsid polypeptide with a 581-589 variant region, relative to WT AAV5, of SEQ ID NO: 4361. The present disclosure provides a tissue-tropic rAAV comprising a VP capsid polypeptide with a 581-589 variant region, relative to WT AAV5, of SEQ ID NO: 4317. The present disclosure provides a tissue-tropic rAAV comprising a VP capsid polypeptide with a 581-589 variant region, relative to WT AAV5, of SEQ ID NO: 5080. The present disclosure provides a tissue-tropic rAAV comprising a VP capsid polypeptide with a 581-589 variant region, relative to WT AAV5, of SEQ ID NO: 23. The present disclosure provides a tissue-tropic rAAV comprising a VP capsid polypeptide with a 581-589 variant region, relative to WT AAV5, of SEQ ID NO: 4343. The present disclosure provides a tissue-tropic rAAV comprising a VP capsid polypeptide with a 581-589 variant region, relative to WT AAV5, of SEQ ID NO: 4986. The present disclosure provides a tissue-tropic rAAV comprising a VP capsid polypeptide with a 581-589 variant region, relative to WT AAV5, of SEQ ID NO: 4311. The present disclosure provides a tissue-tropic rAAV comprising a VP capsid polypeptide with a 581-589 variant region, relative to WT AAV5, of SEQ ID NO: 5102. The present disclosure provides a tissue-tropic rAAV comprising a VP capsid polypeptide with a 581-589 variant region, relative to WT AAV5, of SEQ ID NO: 5280. The present disclosure provides a tissue-tropic rAAV comprising a VP capsid polypeptide with a 581-589 variant region, relative to WT AAV5, of SEQ ID NO: 5185. The present disclosure provides a tissue-tropic rAAV comprising a VP capsid polypeptide with a 581-589 variant region, relative to WT AAV5, of SEQ ID NO: 964. The present disclosure provides a tissue-tropic rAAV comprising a VP capsid polypeptide with a 581-589 variant region, relative to WT AAV5, of SEQ ID NO: 4935. The present disclosure provides a tissue-tropic rAAV comprising a VP capsid polypeptide with a 581-589 variant region, relative to WT AAV5, of SEQ ID NO: 4379. The present disclosure provides a tissue-tropic rAAV comprising a VP capsid polypeptide with a 581-589 variant region, relative to WT AAV5, of SEQ ID NO: 5052. The present disclosure provides a tissue-tropic rAAV comprising a VP capsid polypeptide with a 581-589 variant region, relative to WT AAV5, of SEQ ID NO: 5027. The present disclosure provides a tissue-tropic rAAV comprising a VP capsid polypeptide with a 581-589 variant region, relative to WT AAV5, of SEQ ID NO: 5173. The present disclosure provides a tissue-tropic rAAV comprising a VP capsid polypeptide with a 581-589 variant region, relative to WT AAV5, of SEQ ID NO: 5055. The present disclosure provides a tissue-tropic rAAV comprising a VP capsid polypeptide with a 581-589 variant region, relative to WT AAV5, of SEQ ID NO: 5123. The present disclosure provides a tissue-tropic rAAV comprising a VP capsid polypeptide with a 581-589 variant region, relative to WT AAV5, of SEQ ID NO: 4335. The present disclosure provides a tissue-tropic rAAV comprising a VP capsid polypeptide with a 581-589 variant region, relative to WT AAV5, of SEQ ID NO: 4936. The present disclosure provides a tissue-tropic rAAV comprising a VP capsid polypeptide with a 581-589 variant region, relative to WT AAV5, of SEQ ID NO: 5208. The present disclosure provides a tissue-tropic rAAV comprising a VP capsid polypeptide with a 581-589 variant region, relative to WT AAV5, of SEQ ID NO: 4633. The present disclosure provides a tissue-tropic rAAV comprising a VP capsid polypeptide with a 581-589 variant region, relative to WT AAV5, of SEQ ID NO: 4359. The present disclosure provides a tissue-tropic rAAV comprising a VP capsid polypeptide with a 581-589 variant region, relative to WT AAV5, of SEQ ID NO: 289. The present disclosure provides a tissue-tropic rAAV comprising a VP capsid polypeptide with a 581-589 variant region, relative to WT AAV5, of SEQ ID NO: 4353. The present disclosure provides a tissue-tropic rAAV comprising a VP capsid polypeptide with a 581-589 variant region, relative to WT AAV5, of SEQ ID NO: 4316. The present disclosure provides a tissue-tropic rAAV comprising a VP capsid polypeptide with a 581-589 variant region, relative to WT AAV5, of SEQ ID NO: 5210. The present disclosure provides a tissue-tropic rAAV comprising a VP capsid polypeptide with a 581-589 variant region, relative to WT AAV5, of SEQ ID NO: 4949. The present disclosure provides a tissue-tropic rAAV comprising a VP capsid polypeptide with a 581-589 variant region, relative to WT AAV5, of SEQ ID NO: 4947. The present disclosure provides a tissue-tropic rAAV comprising a VP capsid polypeptide with a 581-589 variant region, relative to WT AAV5, of SEQ ID NO: 2838. The present disclosure provides a tissue-tropic rAAV comprising a VP capsid polypeptide with a 581-589 variant region, relative to WT AAV5, of SEQ ID NO: 378. The present disclosure provides a tissue-tropic rAAV comprising a VP capsid polypeptide with a 581-589 variant region, relative to WT AAV5, of SEQ ID NO: 5013. The present disclosure provides a tissue-tropic rAAV comprising a VP capsid polypeptide with a 581-589 variant region, relative to WT AAV5, of SEQ ID NO: 5278. The present disclosure provides a tissue-tropic rAAV comprising a VP capsid polypeptide with a 581-589 variant region, relative to WT AAV5, of SEQ ID NO: 1471. The present disclosure provides a tissue-tropic rAAV comprising a VP capsid polypeptide with a 581-589 variant region, relative to WT AAV5, of SEQ ID NO: 4346. The present disclosure provides a tissue-tropic rAAV comprising a VP capsid polypeptide with a 581-589 variant region, relative to WT AAV5, of SEQ ID NO: 297. The present disclosure provides a tissue-tropic rAAV comprising a VP capsid polypeptide with a 581-589 variant region, relative to WT AAV5, of SEQ ID NO: 4993. The present disclosure provides a tissue-tropic rAAV comprising a VP capsid polypeptide with a 581-589 variant region, relative to WT AAV5, of SEQ ID NO: 384. The present disclosure provides a tissue-tropic rAAV comprising a VP capsid polypeptide with a 581-589 variant region, relative to WT AAV5, of SEQ ID NO: 5062. The present disclosure provides a tissue-tropic rAAV comprising a VP capsid polypeptide with a 581-589 variant region, relative to WT AAV5, of SEQ ID NO: 4945. The present disclosure provides a tissue-tropic rAAV comprising a VP capsid polypeptide with a 581-589 variant region, relative to WT AAV5, of SEQ ID NO: 3472. The present disclosure provides a tissue-tropic rAAV comprising a VP capsid polypeptide with a 581-589 variant region, relative to WT AAV5, of SEQ ID NO: 3297. The present disclosure provides a tissue-tropic rAAV comprising a VP capsid polypeptide with a 581-589 variant region, relative to WT AAV5, of SEQ ID NO: 210. The present disclosure provides a tissue-tropic rAAV comprising a VP capsid polypeptide with a 581-589 variant region, relative to WT AAV5, of SEQ ID NO: 1971. The present disclosure provides a tissue-tropic rAAV comprising a VP capsid polypeptide with a 581-589 variant region, relative to WT AAV5, of SEQ ID NO: 262. The present disclosure provides a tissue-tropic rAAV comprising a VP capsid polypeptide with a 581-589 variant region, relative to WT AAV5, of SEQ ID NO: 4009. The present disclosure provides a tissue-tropic rAAV comprising a VP capsid polypeptide with a 581-589 variant region, relative to WT AAV5, of SEQ ID NO: 5190. The present disclosure provides a tissue-tropic rAAV comprising a VP capsid polypeptide with a 581-589 variant region, relative to WT AAV5, of SEQ ID NO: 724. The present disclosure provides a tissue-tropic rAAV comprising a VP capsid polypeptide with a 581-589 variant region, relative to WT AAV5, of SEQ ID NO: 1561. The present disclosure provides a tissue-tropic rAAV comprising a VP capsid polypeptide with a 581-589 variant region, relative to WT AAV5, of SEQ ID NO: 5147. The present disclosure provides a tissue-tropic rAAV comprising a VP capsid polypeptide with a 581-589 variant region, relative to WT AAV5, of SEQ ID NO: 4238. The present disclosure provides a tissue-tropic rAAV comprising a VP capsid polypeptide with a 581-589 variant region, relative to WT AAV5, of SEQ ID NO: 5527. The present disclosure provides a tissue-tropic rAAV comprising a VP capsid polypeptide with a 581-589 variant region, relative to WT AAV5, of SEQ ID NO: 3283. The present disclosure provides a tissue-tropic rAAV comprising a VP capsid polypeptide with a 581-589 variant region, relative to WT AAV5, of SEQ ID NO: 4355. The present disclosure provides a tissue-tropic rAAV comprising a VP capsid polypeptide with a 581-589 variant region, relative to WT AAV5, of SEQ ID NO: 5125. The present disclosure provides a tissue-tropic rAAV comprising a VP capsid polypeptide with a 581-589 variant region, relative to WT AAV5, of SEQ ID NO: 4108. The present disclosure provides a tissue-tropic rAAV comprising a VP capsid polypeptide with a 581-589 variant region, relative to WT AAV5, of SEQ ID NO: 2948. The present disclosure provides a tissue-tropic rAAV comprising a VP capsid polypeptide with a 581-589 variant region, relative to WT AAV5, of SEQ ID NO: 3821. The present disclosure provides a tissue-tropic rAAV comprising a VP capsid polypeptide with a 581-589 variant region, relative to WT AAV5, of SEQ ID NO: 4632. The present disclosure provides a tissue-tropic rAAV comprising a VP capsid polypeptide with a 581-589 variant region, relative to WT AAV5, of SEQ ID NO: 294. The present disclosure provides a tissue-tropic rAAV comprising a VP capsid polypeptide with a 581-589 variant region, relative to WT AAV5, of SEQ ID NO: 4943. The present disclosure provides a tissue-tropic rAAV comprising a VP capsid polypeptide with a 581-589 variant region, relative to WT AAV5, of SEQ ID NO: 1391. The present disclosure provides a tissue-tropic rAAV comprising a VP capsid polypeptide with a 581-589 variant region, relative to WT AAV5, of SEQ ID NO: 5078. The present disclosure provides a tissue-tropic rAAV comprising a VP capsid polypeptide with a 581-589 variant region, relative to WT AAV5, of SEQ ID NO: 3299. The present disclosure provides a tissue-tropic rAAV comprising a VP capsid polypeptide with a 581-589 variant region, relative to WT AAV5, of SEQ ID NO: 2897. The present disclosure provides a tissue-tropic rAAV comprising a VP capsid polypeptide with a 581-589 variant region, relative to WT AAV5, of SEQ ID NO: 1537. The present disclosure provides a tissue-tropic rAAV comprising a VP capsid polypeptide with a 581-589 variant region, relative to WT AAV5, of SEQ ID NO: 5255. The present disclosure provides a tissue-tropic rAAV comprising a VP capsid polypeptide with a 581-589 variant region, relative to WT AAV5, of SEQ ID NO: 141. The present disclosure provides a tissue-tropic rAAV comprising a VP capsid polypeptide with a 581-589 variant region, relative to WT AAV5, of SEQ ID NO: 5038. The present disclosure provides a tissue-tropic rAAV comprising a VP capsid polypeptide with a 581-589 variant region, relative to WT AAV5, of SEQ ID NO: 5153. The present disclosure provides a tissue-tropic rAAV comprising a VP capsid polypeptide with a 581-589 variant region, relative to WT AAV5, of SEQ ID NO: 1181. The present disclosure provides a tissue-tropic rAAV comprising a VP capsid polypeptide with a 581-589 variant region, relative to WT AAV5, of SEQ ID NO: 307. The present disclosure provides a tissue-tropic rAAV comprising a VP capsid polypeptide with a 581-589 variant region, relative to WT AAV5, of SEQ ID NO: 1204. The present disclosure provides a tissue-tropic rAAV comprising a VP capsid polypeptide with a 581-589 variant region, relative to WT AAV5, of SEQ ID NO: 4404. The present disclosure provides a tissue-tropic rAAV comprising a VP capsid polypeptide with a 581-589 variant region, relative to WT AAV5, of SEQ ID NO: 5106. The present disclosure provides a tissue-tropic rAAV comprising a VP capsid polypeptide with a 581-589 variant region, relative to WT AAV5, of SEQ ID NO: 2779. The present disclosure provides a tissue-tropic rAAV comprising a VP capsid polypeptide with a 581-589 variant region, relative to WT AAV5, of SEQ ID NO: 1824. The present disclosure provides a tissue-tropic rAAV comprising a VP capsid polypeptide with a 581-589 variant region, relative to WT AAV5, of SEQ ID NO: 5116. The present disclosure provides a tissue-tropic rAAV comprising a VP capsid polypeptide with a 581-589 variant region, relative to WT AAV5, of SEQ ID NO: 3179. The present disclosure provides a tissue-tropic rAAV comprising a VP capsid polypeptide with a 581-589 variant region, relative to WT AAV5, of SEQ ID NO: 3306. The present disclosure provides a tissue-tropic rAAV comprising a VP capsid polypeptide with a 581-589 variant region, relative to WT AAV5, of SEQ ID NO: 98. The present disclosure provides a tissue-tropic rAAV comprising a VP capsid polypeptide with a 581-589 variant region, relative to WT AAV5, of SEQ ID NO: 1872. The present disclosure provides a tissue-tropic rAAV comprising a VP capsid polypeptide with a 581-589 variant region, relative to WT AAV5, of SEQ ID NO: 1268. The present disclosure provides a tissue-tropic rAAV comprising a VP capsid polypeptide with a 581-589 variant region, relative to WT AAV5, of SEQ ID NO: 1634. The present disclosure provides a tissue-tropic rAAV comprising a VP capsid polypeptide with a 581-589 variant region, relative to WT AAV5, of SEQ ID NO: 1060. The present disclosure provides a tissue-tropic rAAV comprising a VP capsid polypeptide with a 581-589 variant region, relative to WT AAV5, of SEQ ID NO: 4941. The present disclosure provides a tissue-tropic rAAV comprising a VP capsid polypeptide with a 581-589 variant region, relative to WT AAV5, of SEQ ID NO: 4981. The present disclosure provides a tissue-tropic rAAV comprising a VP capsid polypeptide with a 581-589 variant region, relative to WT AAV5, of SEQ ID NO: 5274. The present disclosure provides a tissue-tropic rAAV comprising a VP capsid polypeptide with a 581-589 variant region, relative to WT AAV5, of SEQ ID NO: 5816. The present disclosure provides a tissue-tropic rAAV comprising a VP capsid polypeptide with a 581-589 variant region, relative to WT AAV5, of SEQ ID NO: 2842. The present disclosure provides a tissue-tropic rAAV comprising a VP capsid polypeptide with a 581-589 variant region, relative to WT AAV5, of SEQ ID NO: 1934. The present disclosure provides a tissue-tropic rAAV comprising a VP capsid polypeptide with a 581-589 variant region, relative to WT AAV5, of SEQ ID NO: 5817. The present disclosure provides a tissue-tropic rAAV comprising a VP capsid polypeptide with a 581-589 variant region, relative to WT AAV5, of SEQ ID NO: 3998. The present disclosure provides a tissue-tropic rAAV comprising a VP capsid polypeptide with a 581-589 variant region, relative to WT AAV5, of SEQ ID NO: 5026. The present disclosure provides a tissue-tropic rAAV comprising a VP capsid polypeptide with a 581-589 variant region, relative to WT AAV5, of SEQ ID NO: 4290.

### Variant 581-589 Regions for CNS and Cardiac Muscle Dual Tissue Tropism

[0305] The present disclosure provides AAV5 virions with a VP capsid polypeptide having at least one mutation in a region with residues that interact with target cells, where the at least one mutation confers tissue tropism for CNS and cardiac muscle as compared to a wild-type VP capsid polypeptide (e.g., a VP capsid polypeptide of SEQ ID NO: 1, SEQ ID NO: 10, or SEQ ID NO: 11). In some embodiments, provided herein are AAV5 VP capsid polypeptide having at least one mutation in a 581-589 region, corresponding to residues 581 to 589 of AAV5 VP1, and having at least 70%, at least 75%, at least 80%, at least 85%, at least 90%, at least 92%, at least 95%, at least 97%, at least 99%, or 100% sequence identity to any sequence selected from SEQ ID NO: 18, SEQ ID NO: 2536, SEQ ID NO: 3846, SEQ ID NO: 4545, SEQ ID NO: 2661, SEQ ID NO: 1576, SEQ ID NO: 4317, SEQ ID NO: 23, SEQ ID NO: 22, SEQ ID NO: 964, SEQ ID NO: 4288, SEQ ID NO: 4338, SEQ ID NO: 5037, or SEQ ID NO: 4936, wherein said at least one mutation drives CNS and cardiac muscle tissue tropism. The present disclosure provides an rAAV having a VP capsid polypeptide with a 581-589 variant region of SEQ ID NO: 18, wherein the rAAV has tissue tropism for CNS tissue and cardiac muscle tissue. The present disclosure provides an rAAV having a VP capsid polypeptide with a 581-589 variant region of SEQ ID NO: 2536, wherein the rAAV has tissue tropism for CNS tissue and cardiac muscle tissue. The present disclosure provides an rAAV having a VP capsid polypeptide with a 581-589 variant region of SEQ ID NO: 3846, wherein the rAAV has tissue tropism for CNS tissue and cardiac muscle tissue. The present disclosure provides an rAAV having a VP capsid polypeptide with a 581-589 variant region of SEQ ID NO: 4545, wherein the rAAV has tissue tropism for CNS tissue and cardiac muscle tissue. The present disclosure provides an rAAV having a VP capsid polypeptide with a 581-589 variant region of SEQ ID NO: 2661, wherein the rAAV has tissue tropism for CNS tissue and cardiac muscle tissue. The present disclosure provides an rAAV having a VP capsid polypeptide with a 581-589 variant region of SEQ ID NO: 1576, wherein the rAAV has tissue tropism for CNS tissue and cardiac muscle tissue. The present disclosure provides an rAAV having a VP capsid polypeptide with a 581-589 variant region of SEQ ID NO: 4317, wherein the rAAV has tissue tropism for CNS tissue and cardiac muscle tissue. The present disclosure provides an rAAV having a VP capsid polypeptide with a 581-589 variant region of SEQ ID NO: 23, wherein the rAAV has tissue tropism for CNS tissue and cardiac muscle tissue. The present disclosure provides an rAAV having a VP capsid polypeptide with a 581-589 variant region of SEQ ID NO: 22, wherein the rAAV has tissue tropism for CNS tissue and cardiac muscle tissue. The present disclosure provides an rAAV having a VP capsid polypeptide with a 581-589 variant region of SEQ ID NO: 964, wherein the rAAV has tissue tropism for CNS tissue and cardiac muscle tissue. The present disclosure provides an rAAV having a VP capsid polypeptide with a 581-589 variant region of SEQ ID NO: 4288, wherein the rAAV has tissue tropism for CNS tissue and cardiac muscle tissue. The present disclosure provides an rAAV having a VP capsid polypeptide with a 581-589 variant region of SEQ ID NO: 4338, wherein the rAAV has tissue tropism for CNS tissue and cardiac muscle tissue. The present disclosure provides an rAAV having a VP capsid polypeptide with a 581-589 variant region of SEQ ID NO: 5037, wherein the rAAV has tissue tropism for CNS tissue and cardiac muscle tissue. The present disclosure provides an rAAV having a VP capsid polypeptide with a 581-589 variant region of SEQ ID NO: 4936, wherein the rAAV has tissue tropism for CNS tissue and cardiac muscle tissue.

### Variant 581-589 Regions for CNS and Skeletal Muscle Dual Tissue Tropism

[0306] The present disclosure provides AAV5 virions with a VP capsid polypeptide having at least one mutation in a region with residues that interact with target cells, where the at least one mutation confers tissue tropism for CNS and skeletal muscle as compared to a wild-type VP capsid polypeptide (e.g., a VP capsid polypeptide of SEQ ID NO: 1, SEQ ID NO: 10, or SEQ ID NO: 11). In some embodiments, provided herein are AAV5 VP capsid polypeptide having at least one mutation in a 581-589 region, corresponding to residues 581 to 589 of AAV5 VP1, and having at least 70%, at least 75%, at least 80%, at least 85%, at least 90%, at least 92%, at least 95%, at least 97%, at least 99%, or 100% sequence identity to any sequence selected from SEQ ID NO: 18, SEQ ID NO: 3472, SEQ ID NO: 262, SEQ ID NO: 3306, SEQ ID NO: 2536, SEQ ID NO: 1971, SEQ ID NO: 3283, SEQ ID NO: 3297, SEQ ID NO: 4545, SEQ ID NO: 2661, SEQ ID NO: 307, SEQ ID NO: 4317, SEQ ID NO: 1268, SEQ ID NO: 4288, SEQ ID NO: 724, or SEQ ID NO: 5037, wherein said at least one mutation drives CNS and skeletal muscle tissue tropism. The present disclosure provides an rAAV having a VP capsid polypeptide with a 581-589 variant region of SEQ ID NO: 18, wherein the rAAV has tissue tropism for CNS tissue and skeletal muscle tissue. The present disclosure provides an rAAV having a VP capsid polypeptide with a 581-589 variant region of SEQ ID NO: 3472, wherein the rAAV has tissue tropism for CNS tissue and skeletal muscle tissue. The present disclosure provides an rAAV having a VP capsid polypeptide with a 581-589 variant region of SEQ ID NO: 262, wherein the rAAV has tissue tropism for CNS tissue and skeletal muscle tissue. The present disclosure provides an rAAV having a VP capsid polypeptide with a 581-589 variant region of SEQ ID NO: 3306, wherein the rAAV has tissue tropism for CNS tissue and skeletal muscle tissue. The present disclosure provides an rAAV having a VP capsid polypeptide with a 581-589 variant region of SEQ ID NO: 2536, wherein the rAAV has tissue tropism for CNS tissue and skeletal muscle tissue. The present disclosure provides an rAAV having a VP capsid polypeptide with a 581-589 variant region of SEQ ID NO: 1971, wherein the rAAV has tissue tropism for CNS tissue and skeletal muscle tissue. The present disclosure provides an rAAV having a VP capsid polypeptide with a 581-589 variant region of SEQ ID NO: 3283, wherein the rAAV has tissue tropism for CNS tissue and skeletal muscle tissue. The present disclosure provides an rAAV having a VP capsid polypeptide with a 581-589 variant region of SEQ ID NO: 3297, wherein the rAAV has tissue tropism for CNS tissue and skeletal muscle tissue. The present disclosure provides an rAAV having a VP capsid polypeptide with a 581-589 variant region of SEQ ID NO: 4545, wherein the rAAV has tissue tropism for CNS tissue and skeletal muscle tissue. The present disclosure provides an rAAV having a VP capsid polypeptide with a 581-589 variant region of SEQ ID NO: 2661, wherein the rAAV has tissue tropism for CNS tissue and skeletal muscle tissue. The present disclosure provides an rAAV having a VP capsid polypeptide with a 581-589 variant region of SEQ ID NO: 307, wherein the rAAV has tissue tropism for CNS tissue and skeletal muscle tissue. The present disclosure provides an rAAV having a VP capsid polypeptide with a 581-589 variant region of SEQ ID NO: 4317, wherein the rAAV has tissue tropism for CNS tissue and skeletal muscle tissue. The present disclosure provides an rAAV having a VP capsid polypeptide with a 581-589 variant region of SEQ ID NO: 1268, wherein the rAAV has tissue tropism for CNS tissue and skeletal muscle tissue. The present disclosure provides an rAAV having a VP capsid polypeptide with a 581-589 variant region of SEQ ID NO: 4288, wherein the rAAV has tissue tropism for CNS tissue and skeletal muscle tissue. The present disclosure provides an rAAV having a VP capsid polypeptide with a 581-589 variant region of SEQ ID NO: 724, wherein the rAAV has tissue tropism for CNS tissue and skeletal muscle tissue. The present disclosure provides an rAAV having a VP capsid polypeptide with a 581-589 variant region of SEQ ID NO: 5037, wherein the rAAV has tissue tropism for CNS tissue and skeletal muscle tissue.

### Variant 581-589 Regions for CNS and Muscle Dual Tissue Tropism

[0307] The present disclosure provides AAV5 virions with a VP capsid polypeptide having at least one mutation in a region with residues that interact with target cells, where the at least one mutation confers tissue tropism for CNS and muscle as compared to a wild-type VP capsid polypeptide (e.g., a VP capsid polypeptide of SEQ ID NO: 1, SEQ ID NO: 10, or SEQ ID NO: 11). In some embodiments, provided herein are AAV5 VP capsid polypeptide having at least one mutation in a 581-589 region, corresponding to residues 581 to 589 of AAV5 VP1, and having at least 70%, at least 75%, at least 80%, at least 85%, at least 90%, at least 92%, at least 95%, at least 97%, at least 99%, or 100% sequence identity to any sequence selected from SEQ ID NO: 18, SEQ ID NO: 3472, SEQ ID NO: 262, SEQ ID NO: 2536, SEQ ID NO: 3846, SEQ ID NO: 3297, SEQ ID NO: 4545, SEQ ID NO: 2661, SEQ ID NO: 1576, SEQ ID NO: 4317, SEQ ID NO: 23, SEQ ID NO: 22, SEQ ID NO: 964, SEQ ID NO: 4288, SEQ ID NO: 4290, SEQ ID NO: 4338, or SEQ ID NO: 5037, wherein said at least one mutation drives CNS and muscle tissue tropism. The present disclosure provides an rAAV having a VP capsid polypeptide with a 581-589 variant region of SEQ ID NO: 18, wherein the rAAV has tissue tropism for CNS tissue and muscle tissue. The present disclosure provides an rAAV having a VP capsid polypeptide with a 581-589 variant region of SEQ ID NO: 3472, wherein the rAAV has tissue tropism for CNS tissue and muscle tissue. The present disclosure provides an rAAV having a VP capsid polypeptide with a 581-589 variant region of SEQ ID NO: 262, wherein the rAAV has tissue tropism for CNS tissue and muscle tissue. The present disclosure provides an rAAV having a VP capsid polypeptide with a 581-589 variant region of SEQ ID NO: 2536, wherein the rAAV has tissue tropism for CNS tissue and muscle tissue. The present disclosure provides an rAAV having a VP capsid polypeptide with a 581-589 variant region of SEQ ID NO: 3846, wherein the rAAV has tissue tropism for CNS tissue and muscle tissue. The present disclosure provides an rAAV having a VP capsid polypeptide with a 581-589 variant region of SEQ ID NO: 3297, wherein the rAAV has tissue tropism for CNS tissue and muscle tissue. The present disclosure provides an rAAV having a VP capsid polypeptide with a 581-589 variant region of SEQ ID NO: 4545, wherein the rAAV has tissue tropism for CNS tissue and muscle tissue. The present disclosure provides an rAAV having a VP capsid polypeptide with a 581-589 variant region of SEQ ID NO: 2661, wherein the rAAV has tissue tropism for CNS tissue and muscle tissue. The present disclosure provides an rAAV having a VP capsid polypeptide with a 581-589 variant region of SEQ ID NO: 1576, wherein the rAAV has tissue tropism for CNS tissue and muscle tissue. The present disclosure provides an rAAV having a VP capsid polypeptide with a 581-589 variant region of SEQ ID NO: 4317, wherein the rAAV has tissue tropism for CNS tissue and muscle tissue. The present disclosure provides an rAAV having a VP capsid polypeptide with a 581-589 variant region of SEQ ID NO: 23, wherein the rAAV has tissue tropism for CNS tissue and muscle tissue. The present disclosure provides an rAAV having a VP capsid polypeptide with a 581-589 variant region of SEQ ID NO: 22, wherein the rAAV has tissue tropism for CNS tissue and muscle tissue. The present disclosure provides an rAAV having a VP capsid polypeptide with a 581-589 variant region of SEQ ID NO: 964, wherein the rAAV has tissue tropism for CNS tissue and muscle tissue. The present disclosure provides an rAAV having a VP capsid polypeptide with a 581-589 variant region of SEQ ID NO: 4288, wherein the rAAV has tissue tropism for CNS tissue and muscle tissue. The present disclosure provides an rAAV having a VP capsid polypeptide with a 581-589 variant region of SEQ ID NO: 4290, wherein the rAAV has tissue tropism for CNS tissue and muscle tissue. The present disclosure provides an rAAV having a VP capsid polypeptide with a 581-589 variant region of SEQ ID NO: 4338, wherein the rAAV has tissue tropism for CNS tissue and muscle tissue. The present disclosure provides an rAAV having a VP capsid polypeptide with a 581-589 variant region of SEQ ID NO: 5037, wherein the rAAV has tissue tropism for CNS tissue and muscle tissue.

### Variant 581-589 Regions for Cardiac Muscle and Skeletal Muscle Dual Tissue Tropism

[0308] The present disclosure provides AAV5 virions with a VP capsid polypeptide having at least one mutation in a region with residues that interact with target cells, where the at least one mutation confers tissue tropism for cardiac muscle and skeletal muscle as compared to a wild-type VP capsid polypeptide (e.g., a VP capsid polypeptide of SEQ ID NO: 1, SEQ ID NO: 10, or SEQ ID NO: 11). In some embodiments, provided herein are AAV5 VP capsid polypeptide having at least one mutation in a 581-589 region, corresponding to residues 581 to 589 of AAV5 VP1, and having at least 70%, at least 75%, at least 80%, at least 85%, at least 90%, at least 92%, at least 95%, at least 97%, at least 99%, or 100% sequence identity to any sequence selected from SEQ ID NO: 348, SEQ ID NO: 2536, SEQ ID NO: 5607, SEQ ID NO: 4955, SEQ ID NO: 5017, SEQ ID NO: 4349, SEQ ID NO: 4964, SEQ ID NO: 293, SEQ ID NO: 4314, SEQ ID NO: 4995, SEQ ID NO: 4366, SEQ ID NO: 4961, SEQ ID NO: 4952, SEQ ID NO: 5075, SEQ ID NO: 4354, SEQ ID NO: 5060, SEQ ID NO: 5138, SEQ ID NO: 5206, SEQ ID NO: 4288, SEQ ID NO: 5283, SEQ ID NO: 5092, SEQ ID NO: 4059, SEQ ID NO: 4295, SEQ ID NO: 5030, SEQ ID NO: 2661, SEQ ID NO: 4545, SEQ ID NO: 4963, SEQ ID NO: 4363, SEQ ID NO: 5159, SEQ ID NO: 4973, SEQ ID NO: 5157, SEQ ID NO: 4345, SEQ ID NO: 5039, SEQ ID NO: 4304, SEQ ID NO: 18, SEQ ID NO: 386, SEQ ID NO: 308, SEQ ID NO: 278, SEQ ID NO: 5037, SEQ ID NO: 4361, SEQ ID NO: 4317, SEQ ID NO: 4343, SEQ ID NO: 4311, SEQ ID NO: 5055, SEQ ID NO: 4359, SEQ ID NO: 4353, or SEQ ID NO: 4346, wherein said at least one mutation drives cardiac muscle and skeletal muscle tissue tropism. The present disclosure provides an rAAV having a VP capsid polypeptide with a 581-589 variant region of SEQ ID NO: 348, wherein the rAAV has tissue tropism for cardiac muscle tissue and skeletal muscle tissue. The present disclosure provides an rAAV having a VP capsid polypeptide with a 581-589 variant region of SEQ ID NO: 2536, wherein the rAAV has tissue tropism for cardiac muscle tissue and skeletal muscle tissue. The present disclosure provides an rAAV having a VP capsid polypeptide with a 581-589 variant region of SEQ ID NO: 5607, wherein the rAAV has tissue tropism for cardiac muscle tissue and skeletal muscle tissue. The present disclosure provides an rAAV having a VP capsid polypeptide with a 581-589 variant region of SEQ ID NO: 4955, wherein the rAAV has tissue tropism for cardiac muscle tissue and skeletal muscle tissue. The present disclosure provides an rAAV having a VP capsid polypeptide with a 581-589 variant region of SEQ ID NO: 5017, wherein the rAAV has tissue tropism for cardiac muscle tissue and skeletal muscle tissue. The present disclosure provides an rAAV having a VP capsid polypeptide with a 581-589 variant region of SEQ ID NO: 4349, wherein the rAAV has tissue tropism for cardiac muscle tissue and skeletal muscle tissue. The present disclosure provides an rAAV having a VP capsid polypeptide with a 581-589 variant region of SEQ ID NO: 4964, wherein the rAAV has tissue tropism for cardiac muscle tissue and skeletal muscle tissue. The present disclosure provides an rAAV having a VP capsid polypeptide with a 581-589 variant region of SEQ ID NO: 293, wherein the rAAV has tissue tropism for cardiac muscle tissue and skeletal muscle tissue. The present disclosure provides an rAAV having a VP capsid polypeptide with a 581-589 variant region of SEQ ID NO: 4314, wherein the rAAV has tissue tropism for cardiac muscle tissue and skeletal muscle tissue. The present disclosure provides an rAAV having a VP capsid polypeptide with a 581-589 variant region of SEQ ID NO: 4995, wherein the rAAV has tissue tropism for cardiac muscle tissue and skeletal muscle tissue. The present disclosure provides an rAAV having a VP capsid polypeptide with a 581-589 variant region of SEQ ID NO: 4366, wherein the rAAV has tissue tropism for cardiac muscle tissue and skeletal muscle tissue. The present disclosure provides an rAAV having a VP capsid polypeptide with a 581-589 variant region of SEQ ID NO: 4961, wherein the rAAV has tissue tropism for cardiac muscle tissue and skeletal muscle tissue. The present disclosure provides an rAAV having a VP capsid polypeptide with a 581-589 variant region of SEQ ID NO: 4952, wherein the rAAV has tissue tropism for cardiac muscle tissue and skeletal muscle tissue. The present disclosure provides an rAAV having a VP capsid polypeptide with a 581-589 variant region of SEQ ID NO: 5075, wherein the rAAV has tissue tropism for cardiac muscle tissue and skeletal muscle tissue. The present disclosure provides an rAAV having a VP capsid polypeptide with a 581-589 variant region of SEQ ID NO: 4354, wherein the rAAV has tissue tropism for cardiac muscle tissue and skeletal muscle tissue. The present disclosure provides an rAAV having a VP capsid polypeptide with a 581-589 variant region of SEQ ID NO: 5060, wherein the rAAV has tissue tropism for cardiac muscle tissue and skeletal muscle tissue. The present disclosure provides an rAAV having a VP capsid polypeptide with a 581-589 variant region of SEQ ID NO: 5138, wherein the rAAV has tissue tropism for cardiac muscle tissue and skeletal muscle tissue. The present disclosure provides an rAAV having a VP capsid polypeptide with a 581-589 variant region of SEQ ID NO: 5206, wherein the rAAV has tissue tropism for cardiac muscle tissue and skeletal muscle tissue. The present disclosure provides an rAAV having a VP capsid polypeptide with a 581-589 variant region of SEQ ID NO: 4288, wherein the rAAV has tissue tropism for cardiac muscle tissue and skeletal muscle tissue. The present disclosure provides an rAAV having a VP capsid polypeptide with a 581-589 variant region of SEQ ID NO: 5283, wherein the rAAV has tissue tropism for cardiac muscle tissue and skeletal muscle tissue. The present disclosure provides an rAAV having a VP capsid polypeptide with a 581-589 variant region of SEQ ID NO: 5092, wherein the rAAV has tissue tropism for cardiac muscle tissue and skeletal muscle tissue. The present disclosure provides an rAAV having a VP capsid polypeptide with a 581-589 variant region of SEQ ID NO: 4059, wherein the rAAV has tissue tropism for cardiac muscle tissue and skeletal muscle tissue. The present disclosure provides an rAAV having a VP capsid polypeptide with a 581-589 variant region of SEQ ID NO: 4295, wherein the rAAV has tissue tropism for cardiac muscle tissue and skeletal muscle tissue. The present disclosure provides an rAAV having a VP capsid polypeptide with a 581-589 variant region of SEQ ID NO: 5030, wherein the rAAV has tissue tropism for cardiac muscle tissue and skeletal muscle tissue. The present disclosure provides an rAAV having a VP capsid polypeptide with a 581-589 variant region of SEQ ID NO: 2661, wherein the rAAV has tissue tropism for cardiac muscle tissue and skeletal muscle tissue. The present disclosure provides an rAAV having a VP capsid polypeptide with a 581-589 variant region of SEQ ID NO: 4545, wherein the rAAV has tissue tropism for cardiac muscle tissue and skeletal muscle tissue. The present disclosure provides an rAAV having a VP capsid polypeptide with a 581-589 variant region of SEQ ID NO: 4963, wherein the rAAV has tissue tropism for cardiac muscle tissue and skeletal muscle tissue. The present disclosure provides an rAAV having a VP capsid polypeptide with a 581-589 variant region of SEQ ID NO: 4363, wherein the rAAV has tissue tropism for cardiac muscle tissue and skeletal muscle tissue. The present disclosure provides an rAAV having a VP capsid polypeptide with a 581-589 variant region of SEQ ID NO: 5159, wherein the rAAV has tissue tropism for cardiac muscle tissue and skeletal muscle tissue. The present disclosure provides an rAAV having a VP capsid polypeptide with a 581-589 variant region of SEQ ID NO: 4973, wherein the rAAV has tissue tropism for cardiac muscle tissue and skeletal muscle tissue. The present disclosure provides an rAAV having a VP capsid polypeptide with a 581-589 variant region of SEQ ID NO: 5157, wherein the rAAV has tissue tropism for cardiac muscle tissue and skeletal muscle tissue. The present disclosure provides an rAAV having a VP capsid polypeptide with a 581-589 variant region of SEQ ID NO: 4345, wherein the rAAV has tissue tropism for cardiac muscle tissue and skeletal muscle tissue. The present disclosure provides an rAAV having a VP capsid polypeptide with a 581-589 variant region of SEQ ID NO: 5039, wherein the rAAV has tissue tropism for cardiac muscle tissue and skeletal muscle tissue. The present disclosure provides an rAAV having a VP capsid polypeptide with a 581-589 variant region of SEQ ID NO: 4304, wherein the rAAV has tissue tropism for cardiac muscle tissue and skeletal muscle tissue. The present disclosure provides an rAAV having a VP capsid polypeptide with a 581-589 variant region of SEQ ID NO: 18, wherein the rAAV has tissue tropism for cardiac muscle tissue and skeletal muscle tissue. The present disclosure provides an rAAV having a VP capsid polypeptide with a 581-589 variant region of SEQ ID NO: 386, wherein the rAAV has tissue tropism for cardiac muscle tissue and skeletal muscle tissue. The present disclosure provides an rAAV having a VP capsid polypeptide with a 581-589 variant region of SEQ ID NO: 308, wherein the rAAV has tissue tropism for cardiac muscle tissue and skeletal muscle tissue. The present disclosure provides an rAAV having a VP capsid polypeptide with a 581-589 variant region of SEQ ID NO: 278, wherein the rAAV has tissue tropism for cardiac muscle tissue and skeletal muscle tissue. The present disclosure provides an rAAV having a VP capsid polypeptide with a 581-589 variant region of SEQ ID NO: 5037, wherein the rAAV has tissue tropism for cardiac muscle tissue and skeletal muscle tissue. The present disclosure provides an rAAV having a VP capsid polypeptide with a 581-589 variant region of SEQ ID NO: 4361, wherein the rAAV has tissue tropism for cardiac muscle tissue and skeletal muscle tissue. The present disclosure provides an rAAV having a VP capsid polypeptide with a 581-589 variant region of SEQ ID NO: 4317, wherein the rAAV has tissue tropism for cardiac muscle tissue and skeletal muscle tissue. The present disclosure provides an rAAV having a VP capsid polypeptide with a 581-589 variant region of SEQ ID NO: 4343, wherein the rAAV has tissue tropism for cardiac muscle tissue and skeletal muscle tissue. The present disclosure provides an rAAV having a VP capsid polypeptide with a 581-589 variant region of SEQ ID NO: 4311, wherein the rAAV has tissue tropism for cardiac muscle tissue and skeletal muscle tissue. The present disclosure provides an rAAV having a VP capsid polypeptide with a 581-589 variant region of SEQ ID NO: 5055, wherein the rAAV has tissue tropism for cardiac muscle tissue and skeletal muscle tissue. The present disclosure provides an rAAV having a VP capsid polypeptide with a 581-589 variant region of SEQ ID NO: 4359, wherein the rAAV has tissue tropism for cardiac muscle tissue and skeletal muscle tissue. The present disclosure provides an rAAV having a VP capsid polypeptide with a 581-589 variant region of SEQ ID NO: 4353, wherein the rAAV has tissue tropism for cardiac muscle tissue and skeletal muscle tissue. The present disclosure provides an rAAV having a VP capsid polypeptide with a 581-589 variant region of SEQ ID NO: 4346, wherein the rAAV has tissue tropism for cardiac muscle tissue and skeletal muscle tissue.

### Research Tools

[0309] An engineered VP capsid polypeptide of the present disclosure, or a recombinant AAV capsid comprising an engineered VP capsid polypeptide, may be used as a research tool in mice. In some embodiments, a recombinant capsid may exhibit tissue tropism in both humans and in a model organism (e.g., non-human primates or mice). In some embodiments, a recombinant capsid may exhibit tissue tropism in both non-human primates and in a second model organism (e.g., mice). A recombinant AAV capsid exhibiting tissue tropism a first organism (e.g., humans or non-human primates) and a second organism (e.g., non-human primates or mice) may be used as a research tool in the second organism to represent behavior of the recombinant AAV capsid, or a recombinant virus comprising the recombinant AAV capsid, in the second organism. For example, a recombinant AAV capsid having 581-589 region sequences of SEQ ID NO: 5027, SEQ ID NO: 4633, SEQ ID NO: 4943, SEQ ID NO: 386, SEQ ID NO: 334, SEQ ID NO: 4309, SEQ ID NO: 4288, SEQ ID NO: 4964, SEQ ID NO: 5017, SEQ ID NO: 5814 (MACKVHLQP), SEQ ID NO: 4335, SEQ ID NO: 348, SEQ ID NO: 4936, SEQ ID NO: 5206, SEQ ID NO: 4238, SEQ ID NO: 5077, or SEQ ID NO: 5603 may be used as a research tool in mice to represent behavior of the recombinant AAV capsid, or a recombinant virus comprising the recombinant AAV capsid in humans or non-human primates. In some embodiments, a recombinant AAV capsid having 581-589 region sequences of SEQ ID NO: 5027, SEQ ID NO: 4633, SEQ ID NO: 4943, SEQ ID NO: 386, SEQ ID NO: 334, SEQ ID NO: 4309, SEQ ID NO: 4288, SEQ ID NO: 4964, SEQ ID NO: 5017, SEQ ID NO: 5814, SEQ ID NO: 4335, SEQ ID NO: 348, SEQ ID NO: 4936, SEQ ID NO: 5206, SEQ ID NO: 4238, SEQ ID NO: 5077, or SEQ ID NO: 5603 exhibits cardiac muscle tissue tropism in both non-human primates and mice.

[0310] In some embodiments, a 581-589 region of an AAV5 VP capsid polypeptide has a sequence that is at least 75%, at least 77.7%, at least 85%, at least 88.8% or 100% identical to a sequence provided in TABLE 13.

[0311] In some embodiments, a 581-589 region of an AAV5 VP capsid polypeptide has a sequence that is at least 75%, at least 77.7%, at least 85%, at least 88.8% or 100% identical to SEQ ID NO: 5027. In some embodiments, a 581-589 region of an AAV5 VP capsid polypeptide has a sequence that is at least 75%, at least 77.7%, at least 85%, at least 88.8% or 100% identical to SEQ ID NO: 4633. In some embodiments, a 581-589 region of an AAV5 VP capsid polypeptide has a sequence that is at least 75%, at least 77.7%, at least 85%, at least 88.8% or 100% identical to SEQ ID NO: 4943. In some embodiments, a 581-589 region of an AAV5 VP capsid polypeptide has a sequence that is at least 75%, at least 77.7%, at least 85%, at least 88.8% or 100% identical to SEQ ID NO: 386. In some embodiments, a 581-589 region of an AAV5 VP capsid polypeptide has a sequence that is at least 75%, at least 77.7%, at least 85%, at least 88.8% or 100% identical to SEQ ID NO: 334. In some embodiments, a 581-589 region of an AAV5 VP capsid polypeptide has a sequence that is at least 75%, at least 77.7%, at least 85%, at least 88.8% or 100% identical to SEQ ID NO: 4309. In some embodiments, a 581-589 region of an AAV5 VP capsid polypeptide has a sequence that is at least 75%, at least 77.7%, at least 85%, at least 88.8% or 100% identical to SEQ ID NO: 4288. In some embodiments, a 581-589 region of an AAV5 VP capsid polypeptide has a sequence that is at least 75%, at least 77.7%, at least 85%, at least 88.8% or 100% identical to SEQ ID NO: 4964. In some embodiments, a 581-589 region of an AAV5 VP capsid polypeptide has a sequence that is at least 75%, at least 77.7%, at least 85%, at least 88.8% or 100% identical to SEQ ID NO: 5017. In some embodiments, a 581-589 region of an AAV5 VP capsid polypeptide has a sequence that is at least 75%, at least 77.7%, at least 85%, at least 88.8% or 100% identical to SEQ ID NO: 5814. In some embodiments, a 581-589 region of an AAV5 VP capsid polypeptide has a sequence that is at least 75%, at least 77.7%, at least 85%, at least 88.8% or 100% identical to SEQ ID NO: 4335. In some embodiments, a 581-589 region of an AAV5 VP capsid polypeptide has a sequence that is at least 75%, at least 77.7%, at least 85%, at least 88.8% or 100% identical to SEQ ID NO: 348. In some embodiments, a 581-589 region of an AAV5 VP capsid polypeptide has a sequence that is at least 75%, at least 77.7%, at least 85%, at least 88.8% or 100% identical to SEQ ID NO: 4936. In some embodiments, a 581-589 region of an AAV5 VP capsid polypeptide has a sequence that is at least 75%, at least 77.7%, at least 85%, at least 88.8% or 100% identical to SEQ ID NO: 5206. In some embodiments, a 581-589 region of an AAV5 VP capsid polypeptide has a sequence that is at least 75%, at least 77.7%, at least 85%, at least 88.8% or 100% identical to SEQ ID NO: 4238. In some embodiments, a 581-589 region of an AAV5 VP capsid polypeptide has a sequence that is at least 75%, at least 77.7%, at least 85%, at least 88.8% or 100% identical to SEQ ID NO: 5077. In some embodiments, a 581-589 region of an AAV5 VP capsid polypeptide has a sequence that is at least 75%, at least 77.7%, at least 85%, at least 88.8% or 100% identical to SEQ ID NO: 5603.

[0312] In some embodiments, a 581-589 region of an AAV5 VP capsid polypeptide has a sequence of SEQ ID NO: 5027. In some embodiments, a 581-589 region of an AAV5 VP capsid polypeptide has a sequence of SEQ ID NO: 4633. In some embodiments, a 581-589 region of an AAV5 VP capsid polypeptide has a sequence of SEQ ID NO: 4943. In some embodiments, a 581-589 region of an AAV5 VP capsid polypeptide has a sequence of SEQ ID NO: 386. In some embodiments, a 581-589 region of an AAV5 VP capsid polypeptide has a sequence of SEQ ID NO: 334. In some embodiments, a 581-589 region of an AAV5 VP capsid polypeptide has a sequence of SEQ ID NO: 4309. In some embodiments, a 581-589 region of an AAV5 VP capsid polypeptide has a sequence of SEQ ID NO: 4288. In some embodiments, a 581-589 region of an AAV5 VP capsid polypeptide has a sequence of SEQ ID NO: 4964. In some embodiments, a 581-589 region of an AAV5 VP capsid polypeptide has a sequence of SEQ ID NO: 5017. In some embodiments, a 581-589 region of an AAV5 VP capsid polypeptide has a sequence of SEQ ID NO: 5814. In some embodiments, a 581-589 region of an AAV5 VP capsid polypeptide has a sequence of SEQ ID NO: 4335. In some embodiments, a 581-589 region of an AAV5 VP capsid polypeptide has a sequence of SEQ ID NO: 348. In some embodiments, a 581-589 region of an AAV5 VP capsid polypeptide has a sequence of SEQ ID NO: 4936. In some embodiments, a 581-589 region of an AAV5 VP capsid polypeptide has a sequence of SEQ ID NO: 5206. In some embodiments, a 581-589 region of an AAV5 VP capsid polypeptide has a sequence of SEQ ID NO: 4238. In some embodiments, a 581-589 region of an AAV5 VP capsid polypeptide has a sequence of SEQ ID NO: 5077. In some embodiments, a 581-589 region of an AAV5 VP capsid polypeptide has a sequence of SEQ ID NO: 5603.

[0313] In some embodiments, a 581-589 region of an AAV5 VP capsid polypeptide has a sequence of SEQ ID NO: 5027 with 1 or 2 conservative substitutions. In some embodiments, a 581-589 region of an AAV5 VP capsid polypeptide has a sequence of SEQ ID NO: 4633 with 1 or 2 conservative substitutions. In some embodiments, a 581-589 region of an AAV5 VP capsid polypeptide has a sequence of SEQ ID NO: 4943 with 1 or 2 conservative substitutions. In some embodiments, a 581-589 region of an AAV5 VP capsid polypeptide has a sequence of SEQ ID NO: 386 with 1 or 2 conservative substitutions. In some embodiments, a 581-589 region of an AAV5 VP capsid polypeptide has a sequence of SEQ ID NO: 334 with 1 or 2 conservative substitutions. In some embodiments, a 581-589 region of an AAV5 VP capsid polypeptide has a sequence of SEQ ID NO: 4309 with 1 or 2 conservative substitutions. In some embodiments, a 581-589 region of an AAV5 VP capsid polypeptide has a sequence of SEQ ID NO: 4288 with 1 or 2 conservative substitutions. In some embodiments, a 581-589 region of an AAV5 VP capsid polypeptide has a sequence of SEQ ID NO: 4964 with 1 or 2 conservative substitutions. In some embodiments, a 581-589 region of an AAV5 VP capsid polypeptide has a sequence of SEQ ID NO: 5017 with 1 or 2 conservative substitutions. In some embodiments, a 581-589 region of an AAV5 VP capsid polypeptide has a sequence of SEQ ID NO: 5814 with 1 or 2 conservative substitutions. In some embodiments, a 581-589 region of an AAV5 VP capsid polypeptide has a sequence of SEQ ID NO: 4335 with 1 or 2 conservative substitutions. In some embodiments, a 581-589 region of an AAV5 VP capsid polypeptide has a sequence of SEQ ID NO: 348 with 1 or 2 conservative substitutions. In some embodiments, a 581-589 region of an AAV5 VP capsid polypeptide has a sequence of SEQ ID NO: 4936 with 1 or 2 conservative substitutions. In some embodiments, a 581-589 region of an AAV5 VP capsid polypeptide has a sequence of SEQ ID NO: 5206 with 1 or 2 conservative substitutions. In some embodiments, a 581-589 region of an AAV5 VP capsid polypeptide has a sequence of SEQ ID NO: 4238 with 1 or 2 conservative substitutions. In some embodiments, a 581-589 region of an AAV5 VP capsid polypeptide has a sequence of SEQ ID NO: 5077 with 1 or 2 conservative substitutions. In some embodiments, a 581-589 region of an AAV5 VP capsid polypeptide has a sequence of SEQ ID NO: 5603 with 1 or 2 conservative substitutions. The conservative substitutions may be at any position in the 581-589 region.

### NUMBERED EMBODIMENTS

[0314] The following embodiments recite non-limiting permutations of combinations of features disclosed herein. Other permutations of combinations of features are also contemplated. In particular, each of these numbered embodiments is contemplated as depending from or relating to every previous or subsequent numbered embodiment, independent of their order as listed. 1. A viral protein (VP) capsid polypeptide, wherein the VP capsid polypeptide comprises a 581-589 region corresponding to residues 581 to 589 a VP1 polypeptide, wherein the 581-589 region comprises at least one amino acid substitution as compared to SEQ ID NO: 9, and wherein a recombinant viral capsid comprising the VP capsid polypeptide is capable of preferentially targeting a cardiac muscle tissue at a DNA enrichment of at least 25-fold greater than a wild type AAV9. 2. The VP capsid polypeptide of embodiment 1, wherein the 581-589 region has a sequence selected from the group consisting of SEQ ID NO: 348, SEQ ID NO: 2536, SEQ ID NO: 1576, SEQ ID NO: 4955, SEQ ID NO: 5017, SEQ ID NO: 4349, SEQ ID NO: 4964, SEQ ID NO: 293, SEQ ID NO: 4314, SEQ ID NO: 4995, SEQ ID NO: 4366, SEQ ID NO: 4961, SEQ ID NO: 4952, SEQ ID NO: 5075, SEQ ID NO: 4354, SEQ ID NO: 5060, SEQ ID NO: 5138, SEQ ID NO: 5206, SEQ ID NO: 4288, SEQ ID NO: 5092, SEQ ID NO: 4059, SEQ ID NO: 4295, SEQ ID NO: 5030, SEQ ID NO: 4938, SEQ ID NO: 2661, SEQ ID NO: 5215, SEQ ID NO: 4960, SEQ ID NO: 4969, SEQ ID NO: 5023, SEQ ID NO: 4934, SEQ ID NO: 4545, SEQ ID NO: 4963, SEQ ID NO: 4363, SEQ ID NO: 5159, and SEQ ID NO: 4973. 3. The VP capsid polypeptide of any one of embodiments 1-2, wherein the recombinant viral capsid is capable of preferentially targeting the cardiac muscle tissue at a DNA enrichment of at least 30-fold greater than the wild type AAV9. 4. The VP capsid polypeptide of embodiment 3, wherein the 581-589 region has a sequence selected from the group consisting of SEQ ID NO: 348, SEQ ID NO: 2536, SEQ ID NO: 1576, SEQ ID NO: 4955, SEQ ID NO: 5017, SEQ ID NO: 4349, SEQ ID NO: 4964, SEQ ID NO: 293, SEQ ID NO: 4314, SEQ ID NO: 4995, and SEQ ID NO: 4366. 5. The VP capsid polypeptide of any one of embodiments 1-4, wherein the recombinant viral capsid is capable of preferentially targeting the cardiac muscle tissue at a DNA enrichment of at least 50-fold greater than the wild type AAV9. 6. The VP capsid polypeptide of embodiment 5, wherein the 581-589 region has a sequence of SEQ ID NO: 348 or SEQ ID NO: 2536. 7. A viral protein (VP) capsid polypeptide, wherein the VP capsid polypeptide comprises a 581-589 region corresponding to residues 581 to 589 a VP1 polypeptide, wherein the 581-589 region comprises at least one amino acid substitution as compared to SEQ ID NO: 9, and wherein a recombinant viral capsid comprising the VP capsid polypeptide is capable of preferentially targeting a cardiac muscle tissue at an RNA enrichment of at least 10-fold greater than a wild type AAV9. 8. The VP capsid polypeptide of embodiment 7, wherein the 581-589 region has a sequence selected from the group consisting of SEQ ID NO: 348, SEQ ID NO: 5052, SEQ ID NO: 5193, SEQ ID NO: 5138, SEQ ID NO: 5163, SEQ ID NO: 4952, SEQ ID NO: 293, SEQ ID NO: 4317, SEQ ID NO: 5075, SEQ ID NO: 386, SEQ ID NO: 4288, SEQ ID NO: 4995, SEQ ID NO: 5030, SEQ ID NO: 4986, SEQ ID NO: 5206, SEQ ID NO: 4338, SEQ ID NO: 5159, SEQ ID NO: 4346, SEQ ID NO: 5060, SEQ ID NO: 4949, SEQ ID NO: 5017, SEQ ID NO: 5215, SEQ ID NO: 4314, SEQ ID NO: 5080, SEQ ID NO: 4964, SEQ ID NO: 4379, SEQ ID NO: 4304, SEQ ID NO: 18, SEQ ID NO: 4363, SEQ ID NO: 5027, SEQ ID NO: 4349, SEQ ID NO: 5208, and SEQ ID NO: 4938. 9. The VP capsid polypeptide of any one of embodiments 7-8, wherein the recombinant viral capsid is capable of preferentially targeting the cardiac muscle tissue at an RNA enrichment of at least 20-fold or greater than the wild type AAV9. 10. The VP capsid polypeptide of embodiment 9, wherein the 581-589 region has a sequence selected from the group consisting of SEQ ID NO: 348, SEQ ID NO: 5052, SEQ ID NO: 5193, SEQ ID NO: 5138, and SEQ ID NO: 5163. 11. The VP capsid polypeptide of any one of embodiments 7-8, wherein the recombinant viral capsid is capable of preferentially targeting the cardiac muscle tissue at an RNA enrichment of at least 40-fold or greater than the wild type AAV9. 12. The VP capsid polypeptide of embodiment 11, wherein the 581-589 region has a sequence of SEQ ID NO: 348. 13. A viral protein (VP) capsid polypeptide, wherein the VP capsid polypeptide comprises a 581-589 region corresponding to residues 581 to 589 a VP1 polypeptide, wherein the 581-589 region comprises at least one amino acid substitution as compared to SEQ ID NO: 9, and wherein a recombinant viral capsid comprising the VP capsid polypeptide is capable of preferentially targeting a cardiac muscle tissue at a DNA enrichment of at least 5-fold greater than a wild type AAV5. 14. The VP capsid polypeptide of embodiment 13, wherein the 581-589 region has a sequence selected from the group consisting of SEQ ID NO: 348, SEQ ID NO: 2536, SEQ ID NO: 1576, SEQ ID NO: 4955, SEQ ID NO: 5017, SEQ ID NO: 4349, SEQ ID NO: 4964, SEQ ID NO: 293, SEQ ID NO: 4314, SEQ ID NO: 4995, SEQ ID NO: 4366, SEQ ID NO: 4961, SEQ ID NO: 4952, SEQ ID NO: 5075, SEQ ID NO: 4354, SEQ ID NO: 5060, SEQ ID NO: 5138, SEQ ID NO: 5206, SEQ ID NO: 4288, SEQ ID NO: 5092, SEQ ID NO: 4059, SEQ ID NO: 4295, SEQ ID NO: 5030, SEQ ID NO: 4938, SEQ ID NO: 2661, SEQ ID NO: 5215, SEQ ID NO: 4960, SEQ ID NO: 4969, SEQ ID NO: 5023, SEQ ID NO: 4934, SEQ ID NO: 4545, SEQ ID NO: 4963, SEQ ID NO: 4363, SEQ ID NO: 5159, and SEQ ID NO: 4973. 15. The VP capsid polypeptide of any one of embodiments 13-14, wherein the recombinant viral capsid is capable of preferentially targeting the cardiac muscle tissue at a DNA enrichment of at least 10-fold greater than the wild type AAV5. 16. The VP capsid polypeptide of embodiment 15, wherein the 581-589 region has a sequence of SEQ ID NO: 348 or SEQ ID NO: 2536. 17. A viral protein (VP) capsid polypeptide, wherein the VP capsid polypeptide comprises a 581-589 region corresponding to residues 581 to 589 a VP1 polypeptide, wherein the 581-589 region comprises at least one amino acid substitution as compared to SEQ ID NO: 9, and wherein a recombinant viral capsid comprising the VP capsid polypeptide is capable of preferentially targeting a cardiac muscle tissue at an RNA enrichment of at least 5-fold greater than a wild type AAV5. 18. The VP capsid polypeptide of embodiment 17, wherein the 581-589 region has a sequence selected from the group consisting of SEQ ID NO: 348, SEQ ID NO: 5052, SEQ ID NO: 5193, SEQ ID NO: 5138, SEQ ID NO: 5163, SEQ ID NO: 4952, SEQ ID NO: 293, and SEQ ID NO: 4317. 19. The VP capsid polypeptide of any one of embodiments 16-17, wherein the recombinant viral capsid is capable of preferentially targeting the cardiac muscle tissue at an RNA enrichment of at least 10-fold greater than the wild type AAV5. 20. The VP capsid polypeptide of embodiment 19, wherein the 581-589 region has a sequence of SEQ ID NO: 348. 21. A viral protein (VP) capsid polypeptide, wherein the VP capsid polypeptide comprises a 581-589 region corresponding to residues 581 to 589 of a VP1 polypeptide; wherein the 581-589 region has a sequence that is at least 85% identical to: (a) SEQ ID NO: 348, (b) SEQ ID NO: 2536, (c) SEQ ID NO: 1576, (d) SEQ ID NO: 4955, (e) SEQ ID NO: 5017, (f) SEQ ID NO: 4349, (g) SEQ ID NO: 4964, (h) SEQ ID NO: 293, (i) SEQ ID NO: 4314, (j) SEQ ID NO: 4995, (k) SEQ ID NO: 4366, (l) SEQ ID NO: 4961, (m) SEQ ID NO: 4952, (n) SEQ ID NO: 5075, (o) SEQ ID NO: 4354, (p) SEQ ID NO: 5060, (q) SEQ ID NO: 5138, (r) SEQ ID NO: 5206, (s) SEQ ID NO: 4288, (t) SEQ ID NO: 5092, (u) SEQ ID NO: 4059, (v) SEQ ID NO: 4295, (w) SEQ ID NO: 5030, (x) SEQ ID NO: 4938, (y) SEQ ID NO: 2661, (z) SEQ ID NO: 5215, (aa) SEQ ID NO: 4960, (bb) SEQ ID NO: 4969, (cc) SEQ ID NO: 5023, or (dd) SEQ ID NO: 4934. 22. The VP capsid polypeptide of embodiment 21, wherein the 581-589 region has a sequence of: (a) SEQ ID NO: 348, (b) SEQ ID NO: 2536, (c) SEQ ID NO: 1576, (d) SEQ ID NO: 4955, (e) SEQ ID NO: 5017, (f) SEQ ID NO: 4349, (g) SEQ ID NO: 4964, (h) SEQ ID NO: 293, (i) SEQ ID NO: 4314, (j) SEQ ID NO: 4995, (k) SEQ ID NO: 4366, (l) SEQ ID NO: 4961, (m) SEQ ID NO: 4952, (n) SEQ ID NO: 5075, (o) SEQ ID NO: 4354, (p) SEQ ID NO: 5060, (q) SEQ ID NO: 5138, (r) SEQ ID NO: 5206, (s) SEQ ID NO: 4288, (t) SEQ ID NO: 5092, (u) SEQ ID NO: 4059, (v) SEQ ID NO: 4295, (w) SEQ ID NO: 5030, (x) SEQ ID NO: 4938, (y) SEQ ID NO: 2661, (z) SEQ ID NO: 5215, (aa) SEQ ID NO: 4960, (bb) SEQ ID NO: 4969, (cc) SEQ ID NO: 5023, or (dd) SEQ ID NO: 4934. 23. A viral protein (VP) capsid polypeptide, wherein the VP capsid polypeptide comprises a 581-589 region corresponding to residues 581 to 589 a VP1 polypeptide, wherein the 581-589 region comprises at least one amino acid substitution as compared to SEQ ID NO: 9, and wherein a recombinant viral capsid comprising the VP capsid polypeptide is capable of preferentially targeting a skeletal muscle tissue at a DNA enrichment of at least 15-fold greater than a wild type AAV9. 24. The VP capsid polypeptide of embodiment 23, wherein the 581-589 region has a sequence selected from the group consisting of SEQ ID NO: 3472, SEQ ID NO: 3297, SEQ ID NO: 2661, SEQ ID NO: 4545, SEQ ID NO: 348, SEQ ID NO: 18, SEQ ID NO: 4349, SEQ ID NO: 293, SEQ ID NO: 5017, SEQ ID NO: 4955, SEQ ID NO: 4366, SEQ ID NO: 5092, SEQ ID NO: 210, SEQ ID NO: 4059, SEQ ID NO: 2536, SEQ ID NO: 5206, and SEQ ID NO: 1971. 25. The VP capsid polypeptide of any one of embodiments 23-24, wherein the recombinant viral capsid is capable of preferentially targeting the skeletal muscle tissue at a DNA enrichment of at least 20-fold greater than the wild type AAV9. 26. The VP capsid polypeptide of embodiment 25, wherein the 581-589 region has a sequence selected from the group consisting of SEQ ID NO: 3472, SEQ ID NO: 3297, SEQ ID NO: 2661, SEQ ID NO: 4545, and SEQ ID NO: 348. 27. The VP capsid polypeptide of any one of embodiments 23-26, wherein the recombinant viral capsid is capable of preferentially targeting the skeletal muscle tissue at a DNA enrichment of at least 30-fold greater than the wild type AAV9. 28. The VP capsid polypeptide of embodiment 27, wherein the 581-589 region has a sequence of SEQ ID NO: 3472 or SEQ ID NO: 3297. 29. A viral protein (VP) capsid polypeptide, wherein the VP capsid polypeptide comprises a 581-589 region corresponding to residues 581 to 589 a VP1 polypeptide, wherein the 581-589 region comprises at least one amino acid substitution as compared to SEQ ID NO: 9, and wherein a recombinant viral capsid comprising the VP capsid polypeptide is capable of preferentially targeting a skeletal muscle tissue at an RNA enrichment of at least 2-fold greater than a wild type AAV9. 30. The VP capsid polypeptide of embodiment 29, wherein the 581-589 region has a sequence selected from the group consisting of SEQ ID NO: 5138, SEQ ID NO: 3472, SEQ ID NO: 1934, SEQ ID NO: 3283, SEQ ID NO: 5817, SEQ ID NO: 278, SEQ ID NO: 1634, SEQ ID NO: 1391, and SEQ ID NO: 1537. 31. The VP capsid polypeptide of any one of embodiments 29-30, wherein the recombinant viral capsid is capable of preferentially targeting the skeletal muscle tissue at an RNA enrichment of at least 10-fold or greater than the wild type AAV9. 32. The VP capsid polypeptide of embodiment 31, wherein the 581-589 region has a sequence selected from the group consisting of SEQ ID NO: 5138, SEQ ID NO: 3472, SEQ ID NO: 1934, SEQ ID NO: 3283, SEQ ID NO: 5817, and SEQ ID NO: 278. 33. The VP capsid polypeptide of any one of embodiments 29-30, wherein the recombinant viral capsid is capable of preferentially targeting the skeletal muscle tissue at an RNA enrichment of at least 25-fold or greater than the wild type AAV9. 34. The VP capsid polypeptide of embodiment 33, wherein the 581-589 region has a sequence selected from the group consisting of SEQ ID NO: 5138, SEQ ID NO: 3472, SEQ ID NO: 1934, or SEQ ID NO: 3283. 35. A viral protein (VP) capsid polypeptide, wherein the VP capsid polypeptide comprises a 581-589 region corresponding to residues 581 to 589 a VP1 polypeptide, wherein the 581-589 region comprises at least one amino acid substitution as compared to SEQ ID NO: 9, and wherein a recombinant viral capsid comprising the VP capsid polypeptide is capable of preferentially targeting a skeletal muscle tissue at a DNA enrichment of at least 4-fold greater than a wild type AAV5. 36. The VP capsid polypeptide of embodiment 35, wherein the 581-589 region has a sequence selected from the group consisting of SEQ ID NO: 3472, SEQ ID NO: 3297, SEQ ID NO: 2661, SEQ ID NO: 4545, SEQ ID NO: 348, SEQ ID NO: 18, SEQ ID NO: 4349, SEQ ID NO: 293, SEQ ID NO: 5017, SEQ ID NO: 4955, and SEQ ID NO: 4366. 37. The VP capsid polypeptide of any one of embodiments 35-36, wherein the recombinant viral capsid is capable of preferentially targeting the skeletal muscle tissue at a DNA enrichment of at least 5-fold greater than the wild type AAV5. 38. The VP capsid polypeptide of embodiment 37, wherein the 581-589 region has a sequence selected from the group consisting of SEQ ID NO: 3472, SEQ ID NO: 3297, SEQ ID NO: 2661, SEQ ID NO: 4545, and SEQ ID NO: 348. 39. A viral protein (VP) capsid polypeptide, wherein the VP capsid polypeptide comprises a 581-589 region corresponding to residues 581 to 589 a VP1 polypeptide, wherein the 581-589 region comprises at least one amino acid substitution as compared to SEQ ID NO: 9, and wherein a recombinant viral capsid comprising the VP capsid polypeptide is capable of preferentially targeting a skeletal muscle tissue at an RNA enrichment of at least that of a wild type AAV5. 40. The VP capsid polypeptide of embodiment 39, wherein the 581-589 region has a sequence selected from the group consisting of SEQ ID NO: 5138, SEQ ID NO: 3472, SEQ ID NO: 1934, SEQ ID NO: 3283, SEQ ID NO: 5817, and SEQ ID NO: 278. 41. The VP capsid polypeptide of any one of embodiments 39-40, wherein the recombinant viral capsid is capable of preferentially targeting the skeletal muscle tissue at an RNA enrichment of at least 3-fold greater than the wild type AAV5. 42. The VP capsid polypeptide of embodiment 41, wherein the 581-589 region has a sequence selected from the group consisting of SEQ ID NO: 5138, SEQ ID NO: 3472, SEQ ID NO: 1934, and SEQ ID NO: 3283. 43. A viral protein (VP) capsid polypeptide, wherein the VP capsid polypeptide comprises a 581-589 region corresponding to residues 581 to 589 of a VP1 polypeptide; wherein the 581-589 region has a sequence that is at least 85% identical to: (a) SEQ ID NO: 3472, (b) SEQ ID NO: 3297, (c) SEQ ID NO: 2661, (d) SEQ ID NO: 4545, (e) SEQ ID NO: 348, (f) SEQ ID NO: 18, (g) SEQ ID NO: 4349, (h) SEQ ID NO: 293, (i) SEQ ID NO: 5017, (j) SEQ ID NO: 4955, (k) SEQ ID NO: 4366, (l) SEQ ID NO: 5092, (m) SEQ ID NO: 210, (n) SEQ ID NO: 4059, (o) SEQ ID NO: 2536, (p) SEQ ID NO: 5206, (q) SEQ ID NO: 1971, (r) SEQ ID NO: 262, (s) SEQ ID NO: 4343, (t) SEQ ID NO: 4995, (u) SEQ ID NO: 4009, (v) SEQ ID NO: 5190, (w) SEQ ID NO: 724, (x) SEQ ID NO: 4288, (y) SEQ ID NO: 4973, (z) SEQ ID NO: 4314, (aa) SEQ ID NO: 1561, (bb) SEQ ID NO: 5147, (cc) SEQ ID NO: 4238, or (dd) SEQ ID NO: 4961. 44. The VP capsid polypeptide of embodiment 43, wherein the 581-589 region has a sequence of: (a) SEQ ID NO: 3472, (b) SEQ ID NO: 3297, (c) SEQ ID NO: 2661, (d) SEQ ID NO: 4545, (e) SEQ ID NO: 348, (f) SEQ ID NO: 18, (g) SEQ ID NO: 4349, (h) SEQ ID NO: 293, (i) SEQ ID NO: 5017, (j) SEQ ID NO: 4955, (k) SEQ ID NO: 4366, (l) SEQ ID NO: 5092, (m) SEQ ID NO: 210, (n) SEQ ID NO: 4059, (o) SEQ ID NO: 2536, (p) SEQ ID NO: 5206, (q) SEQ ID NO: 1971, (r) SEQ ID NO: 262, (s) SEQ ID NO: 4343, (t) SEQ ID NO: 4995, (u) SEQ ID NO: 4009, (v) SEQ ID NO: 5190, (w) SEQ ID NO: 724, (x) SEQ ID NO: 4288, (y) SEQ ID NO: 4973, (z) SEQ ID NO: 4314, (aa) SEQ ID NO: 1561, (bb) SEQ ID NO: 5147, (cc) SEQ ID NO: 4238, or (dd) SEQ ID NO: 4961. 45. A viral protein (VP) capsid polypeptide, wherein the VP capsid polypeptide comprises a 581-589 region corresponding to residues 581 to 589 a VP1 polypeptide, wherein the 581-589 region comprises at least one amino acid substitution as compared to SEQ ID NO: 9, and wherein a recombinant viral capsid comprising the VP capsid polypeptide is capable of preferentially targeting a muscle tissue at a DNA enrichment of at least 20-fold greater than a wild type AAV9. 46. The VP capsid polypeptide of embodiment 45, wherein the 581-589 region has a sequence selected from the group consisting of SEQ ID NO: 348, SEQ ID NO: 2536, SEQ ID NO: 4955, SEQ ID NO: 5017, SEQ ID NO: 4349, SEQ ID NO: 293, SEQ ID NO: 1576, SEQ ID NO: 2661, SEQ ID NO: 4964, SEQ ID NO: 4314, SEQ ID NO: 4995, SEQ ID NO: 4366, SEQ ID NO: 4545, SEQ ID NO: 4961, SEQ ID NO: 5206, SEQ ID NO: 5092, SEQ ID NO: 3472, SEQ ID NO: 5075, SEQ ID NO: 4059, SEQ ID NO: 4354, SEQ ID NO: 5060, SEQ ID NO: 4288, SEQ ID NO: 4952, SEQ ID NO: 5138, SEQ ID NO: 18, SEQ ID NO: 5030, SEQ ID NO: 3297, SEQ ID NO: 4295, SEQ ID NO: 4363, SEQ ID NO: 4963, SEQ ID NO: 4973, SEQ ID NO: 5159, SEQ ID NO: 4960, SEQ ID NO: 4938, SEQ ID NO: 5157, SEQ ID NO: 5023, and SEQ ID NO: 4969. 47. The VP capsid polypeptide of any one of embodiments 45-46, wherein the recombinant viral capsid is capable of preferentially targeting the muscle tissue at a DNA enrichment of at least 25-fold greater than the wild type AAV9. 48. The VP capsid polypeptide of embodiment 47, wherein the 581-589 region has a sequence selected from the group consisting of SEQ ID NO: 348, SEQ ID NO: 2536, SEQ ID NO: 4955, SEQ ID NO: 5017, SEQ ID NO: 4349, SEQ ID NO: 293, SEQ ID NO: 1576, SEQ ID NO: 2661, SEQ ID NO: 4964, SEQ ID NO: 4314, SEQ ID NO: 4995, and SEQ ID NO: 4366. 49. The VP capsid polypeptide of any one of embodiments 46-48, wherein the recombinant viral capsid is capable of preferentially targeting the muscle tissue at a DNA enrichment of at least 30-fold greater than the wild type AAV9. 50. The VP capsid polypeptide of embodiment 49, wherein the 581-589 region has a sequence of SEQ ID NO: 348 or SEQ ID NO: 2536. 51. A viral protein (VP) capsid polypeptide, wherein the VP capsid polypeptide comprises a 581-589 region corresponding to residues 581 to 589 a VP1 polypeptide, wherein the 581-589 region comprises at least one amino acid substitution as compared to SEQ ID NO: 9, and wherein a recombinant viral capsid comprising the VP capsid polypeptide is capable of preferentially targeting a muscle tissue at an RNA enrichment of at least 5-fold greater than a wild type AAV9. 52. The VP capsid polypeptide of embodiment 51, wherein the 581-589 region has a sequence selected from the group consisting of SEQ ID NO: 5138, SEQ ID NO: 3472, SEQ ID NO: 348, SEQ ID NO: 5052, SEQ ID NO: 5193, SEQ ID NO: 5026, SEQ ID NO: 278, SEQ ID NO: 5163, SEQ ID NO: 293, SEQ ID NO: 4943, SEQ ID NO: 4952, SEQ ID NO: 4317, SEQ ID NO: 5075, SEQ ID NO: 386, SEQ ID NO: 4986, SEQ ID NO: 4995, SEQ ID NO: 4288, SEQ ID NO: 5030, SEQ ID NO: 5206, SEQ ID NO: 5159, SEQ ID NO: 4949, SEQ ID NO: 4338, SEQ ID NO: 5060, SEQ ID NO: 4346, SEQ ID NO: 5215, SEQ ID NO: 5017, SEQ ID NO: 4314, SEQ ID NO: 5080, SEQ ID NO: 4964, SEQ ID NO: 4363, SEQ ID NO: 4379, SEQ ID NO: 5027, SEQ ID NO: 4304, SEQ ID NO: 18, SEQ ID NO: 4349, SEQ ID NO: 4938, and SEQ ID NO: 2536. 53. The VP capsid polypeptide of any one of embodiments 51-52, wherein the recombinant viral capsid is capable of preferentially targeting the muscle tissue at an RNA enrichment of at least 10-fold or greater than the wild type AAV9. 54. The VP capsid polypeptide of embodiment 53, wherein the 581-589 region has a sequence selected from the group consisting of SEQ ID NO: 5138, SEQ ID NO: 3472, SEQ ID NO: 348, SEQ ID NO: 5052, SEQ ID NO: 5193, SEQ ID NO: 5026, SEQ ID NO: 278, and SEQ ID NO: 5163. 55. The VP capsid polypeptide of any one of embodiments 51-52, wherein the recombinant viral capsid is capable of preferentially targeting the muscle tissue at an RNA enrichment of at least 100-fold or greater than the wild type AAV9. 56. The VP capsid polypeptide of embodiment 55, wherein the 581-589 region has a sequence of SEQ ID NO: 5138. 57. A viral protein (VP) capsid polypeptide, wherein the VP capsid polypeptide comprises a 581-589 region corresponding to residues 581 to 589 a VP1 polypeptide, wherein the 581-589 region comprises at least one amino acid substitution as compared to SEQ ID NO: 9, and wherein a recombinant viral capsid comprising the VP capsid polypeptide is capable of preferentially targeting a muscle tissue at a DNA enrichment of at least 5-fold greater than a wild type AAV5. 58. The VP capsid polypeptide of embodiment 57, wherein the 581-589 region has a sequence selected from the group consisting of SEQ ID NO: 348, SEQ ID NO: 2536, SEQ ID NO: 4955, SEQ ID NO: 5017, SEQ ID NO: 4349, SEQ ID NO: 293, SEQ ID NO: 1576, SEQ ID NO: 2661, SEQ ID NO: 4964, SEQ ID NO: 4314, SEQ ID NO: 4995, SEQ ID NO: 4366, SEQ ID NO: 4545, SEQ ID NO: 4961, SEQ ID NO: 5206, SEQ ID NO: 5092, SEQ ID NO: 3472, SEQ ID NO: 5075, SEQ ID NO: 4059, SEQ ID NO: 4354, and SEQ ID NO: 5060. 59. The VP capsid polypeptide of any one of embodiments 57-58, wherein the recombinant viral capsid is capable of preferentially targeting the muscle tissue at a DNA enrichment of at least 10-fold greater than the wild type AAV5. 60. The VP capsid polypeptide of embodiment 59, wherein the 581-589 region has a sequence of SEQ ID NO: 348. 61. A viral protein (VP) capsid polypeptide, wherein the VP capsid polypeptide comprises a 581-589 region corresponding to residues 581 to 589 a VP1 polypeptide, wherein the 581-589 region comprises at least one amino acid substitution as compared to SEQ ID NO: 9, and wherein a recombinant viral capsid comprising the VP capsid polypeptide is capable of preferentially targeting a muscle tissue at an RNA enrichment of at least that of a wild type AAV5. 62. The VP capsid polypeptide of embodiment 61, wherein the 581-589 region has a sequence selected from the group consisting of SEQ ID NO: 5138, SEQ ID NO: 3472, SEQ ID NO: 348, SEQ ID NO: 5052, SEQ ID NO: 5193, SEQ ID NO: 5026, SEQ ID NO: 278, SEQ ID NO: 5163, SEQ ID NO: 293, SEQ ID NO: 4943, SEQ ID NO: 4952, SEQ ID NO: 4317, SEQ ID NO: 5075, SEQ ID NO: 386, SEQ ID NO: 4986, and SEQ ID NO: 4995. 63. The VP capsid polypeptide of any one of embodiments 61-62, wherein the recombinant viral capsid is capable of preferentially targeting the muscle tissue at an RNA enrichment of at least 2-fold greater than the wild type AAV5. 64. The VP capsid polypeptide of embodiment 63, wherein the 581-589 region has a sequence selected from the group consisting of SEQ ID NO: 5138, SEQ ID NO: 3472, SEQ ID NO: 348, and SEQ ID NO: 5052. 65. A viral protein (VP) capsid polypeptide, wherein the VP capsid polypeptide comprises a 581-589 region corresponding to residues 581 to 589 of a VP1 polypeptide; wherein the 581-589 region has a sequence that is at least 85% identical to: (a) SEQ ID NO: 348, (b) SEQ ID NO: 2536, (c) SEQ ID NO: 4955, (d) SEQ ID NO: 5017, (e) SEQ ID NO: 4349, (f) SEQ ID NO: 293, (g) SEQ ID NO: 1576, (h) SEQ ID NO: 2661, (i) SEQ ID NO: 4964, (j) SEQ ID NO: 4314, (k) SEQ ID NO: 4995, (l) SEQ ID NO: 4366, (m) SEQ ID NO: 4545, (n) SEQ ID NO: 4961, (o) SEQ ID NO: 5206, (p) SEQ ID NO: 5092, (q) SEQ ID NO: 3472, (r) SEQ ID NO: 5075, (s) SEQ ID NO: 4059, (t) SEQ ID NO: 4354, (u) SEQ ID NO: 5060, (v) SEQ ID NO: 4288, (w) SEQ ID NO: 4952, (x) SEQ ID NO: 5138, (y) SEQ ID NO: 18, (z) SEQ ID NO: 5030, (aa) SEQ ID NO: 3297, (bb) SEQ ID NO: 4295, (cc) SEQ ID NO: 4363, or (dd) SEQ ID NO: 4963. 66. The VP capsid polypeptide of embodiment 65, wherein the 581-589 region has a sequence of: (a) SEQ ID NO: 348, (b) SEQ ID NO: 2536, (c) SEQ ID NO: 4955, (d) SEQ ID NO: 5017, (e) SEQ ID NO: 4349, (f) SEQ ID NO: 293, (g) SEQ ID NO: 1576, (h) SEQ ID NO: 2661, (i) SEQ ID NO: 4964, (j) SEQ ID NO: 4314, (k) SEQ ID NO: 4995, (l) SEQ ID NO: 4366, (m) SEQ ID NO: 4545, (n) SEQ ID NO: 4961, (o) SEQ ID NO: 5206, (p) SEQ ID NO: 5092, (q) SEQ ID NO: 3472, (r) SEQ ID NO: 5075, (s) SEQ ID NO: 4059, (t) SEQ ID NO: 4354, (u) SEQ ID NO: 5060, (v) SEQ ID NO: 4288, (w) SEQ ID NO: 4952, (x) SEQ ID NO: 5138, (y) SEQ ID NO: 18, (z) SEQ ID NO: 5030, (aa) SEQ ID NO: 3297, (bb) SEQ ID NO: 4295, (cc) SEQ ID NO: 4363, or (dd) SEQ ID NO: 4963. 67. A viral protein (VP) capsid polypeptide, wherein the VP capsid polypeptide comprises a 581-589 region corresponding to residues 581 to 589 of a VP1 polypeptide, wherein the 581-589 region comprises a sequence having at least 85% identity to any one of any one of SEQ ID NO: 4238-SEQ ID NO: 4933 or SEQ ID NO: 4934-SEQ ID NO: 5233. 68. The VP capsid polypeptide of embodiment 67, wherein the 581-589 region has a sequence of any one of any one of SEQ ID NO: 4238-SEQ ID NO: 4933 or SEQ ID NO: 4934-SEQ ID NO: 5233. 69. The VP capsid polypeptide of any one of embodiments 1-68, wherein the VP capsid polypeptide is capable of assembling into a recombinant viral capsid. 70. A viral protein (VP) capsid polypeptide, wherein the VP capsid polypeptide is capable of assembling into a recombinant viral capsid, and wherein the VP capsid polypeptide comprises a 581-589 region corresponding to residues 581 to 589 of a VP1 polypeptide; wherein the 581-589 region: comprises at least one amino acid substitution as compared to residues 581 to 589 of SEQ ID NO: 1, and confers on the recombinant viral capsid an infection rate for muscle tissue with at least 3-fold higher muscle tissue tropism than a wild type VP capsid polypeptide of SEQ ID NO: 1; wherein the VP capsid polypeptide comprises at least one amino acid substitution as compared to each of SEQ ID NO: 3, SEQ ID NO: 4, SEQ ID NO: 5, SEQ ID NO: 6, SEQ ID NO: 7, and SEQ ID NO: 8. 71. The VP capsid polypeptide of embodiment 70, wherein the 581-589 region comprises a sequence of X¹X²X³X⁴X⁵X⁶X⁷X⁸X⁹, wherein X¹, X², X³, X⁴, X⁵, X⁶, X⁷, X⁸, and X⁹ are each individually selected from A, R, N, D, C, E, Q, G, H, I, L, K, M, F, P, S, T, W, Y, and V. 72. The VP capsid polypeptide of embodiment 70 or embodiment 83, wherein the VP capsid polypeptide has a sequence of SEQ ID NO: 2, wherein residues 581 to 589 of SEQ ID NO: 2 (X¹X²X³X⁴X⁵X⁶X⁷X⁸X⁹) correspond to the 581-589 region. 73. The VP capsid polypeptide of any one of embodiments 70-72, wherein the 581-589 region has a sequence that is at least 70%, at least 77%, at least 80%, at least 88%, at least 90%, or at least 95% identical to any one of SEQ ID NO: 4238-SEQ ID NO: 4933. 74. The VP capsid polypeptide of any one of embodiments 70-72, wherein the 581-589 region has a sequence of any one of SEQ ID NO: 4238-SEQ ID NO: 4933. 75. The VP capsid polypeptide of any one of embodiments 82-84, wherein the 581-589 region has a sequence that is at least 70%, at least 77%, at least 80%, at least 88%, at least 90%, or at least 95% identical to any one of SEQ ID NO: 4934-SEQ ID NO: 5233. 76. The VP capsid polypeptide of any one of embodiments 70-72, wherein the 581-589 region has a sequence of any one of SEQ ID NO: 4934-SEQ ID NO: 5233. 77. The VP capsid polypeptide of any one of embodiments 1-76, wherein the muscle tissue comprises cardiac muscle tissue. 78. The VP capsid polypeptide of any one of embodiments 1-77, wherein the muscle tissue comprises skeletal muscle tissue. 79. The VP capsid polypeptide of any one of embodiments 1-78, wherein the muscle tissue comprises skeletal muscle tissue and cardiac muscle tissue. 80. The VP capsid polypeptide of any one of embodiments 1-79, wherein the VP capsid polypeptide comprises an amino acid sequence at least 70%, at least 80%, at least 85%, at least 90%, at least 95%, at least 97%, at least 98%, at least 98.5%, at least 99%, or at least 99.5% identical to SEQ ID NO: 1. 81. The VP capsid polypeptide of any one of embodiments 1-80, wherein the infection rate for muscle tissue is at least 2.5-fold, at least 3-fold, at least 3.5-fold, at least 4-fold, at least 5-fold, at least 10-fold, at least 20-fold, at least 50-fold, at least 75-fold, at least 100-fold, at least 200-fold, at least 500-fold, or at least 1000-fold higher tissue tropism than an infection rate of the wild type VP capsid polypeptide for muscle tissue. 82. The VP capsid polypeptide of any one of embodiments 1-81, wherein the 581-589 region confers on a recombinant viral capsid assembled from the VP capsid polypeptide improved stability compared to a wild type AAV5 capsid comprising a peptide of SEQ ID NO: 1. 83. The VP capsid polypeptide of any one of embodiments 1-82, wherein the 581-589 region confers lower toxicity upon administration to a subject compared to a wild type VP capsid polypeptide of SEQ ID NO: 1. 84. The VP capsid polypeptide of any one of embodiments 1-83, wherein the muscle tissue is selected from aorta, esophagus, heart, skeletal muscle, and combinations thereof. 85. A pharmaceutical composition comprising the VP capsid polypeptide of any one of embodiments 1-84. 86. The pharmaceutical composition of embodiment 85, wherein the VP capsid polypeptide is assembled into a recombinant viral capsid. 87. The pharmaceutical composition of embodiment 85 or embodiment 86, further comprising a payload encapsidated by the recombinant viral capsid. 88. The pharmaceutical composition of embodiment 87, wherein the payload encodes a therapeutic polynucleotide or a therapeutic peptide. 89. The pharmaceutical composition of embodiment 87, wherein the payload encodes a guide RNA, a tRNA, a suppressor tRNA, a siRNA, a miRNA, an mRNA, a shRNA, a circular RNA, or an antisense oligonucleotide (ASO), a ribozyme, a DNAzyme, an aptamer, or any combination thereof 90. The pharmaceutical composition of embodiment 87, wherein the payload encodes a component of a CRISPR/Cas system, an adenosine deaminase acting on RNA (ADAR) enzyme, a transcriptional activator, or a transcriptional repressor. 91. A recombinant adeno-associated virus (rAAV), comprising the VP capsid polypeptide of any one of embodiments 1-84 assembled into a recombinant viral capsid and a payload encapsidated by the recombinant viral capsid. 92. The rAAV of embodiment 91, further comprising a VP2 polypeptide comprising the 581-589 region and a VP3 polypeptide comprising the 581-589 region. 93. The rAAV of embodiment 91 or embodiment 92, wherein the payload encodes a therapeutic polynucleotide or a therapeutic peptide. 94. The rAAV of embodiment 93, wherein the payload encodes a guide RNA, a tRNA, a suppressor tRNA, a siRNA, a miRNA, an mRNA, a shRNA, a circular RNA, or an antisense oligonucleotide (ASO), a ribozyme, a DNAzyme, an aptamer, or any combination thereof 95. The rAAV of embodiment 93, wherein the payload encodes a component of a CRISPR/Cas system, an adenosine deaminase acting on RNA (ADAR) enzyme, a transcriptional activator, or a transcriptional repressor. 96. A method of delivering a payload to a muscle tissue of a subject, the method comprising: administering a recombinant adeno-associated virus (rAAV) to the subject, wherein the rAAV encapsidates the payload, and wherein the rAAV comprises a VP capsid polypeptide comprising a 581-589 region corresponding to residues 581 to 589 of a VP1 polypeptide, wherein the 581-589 region comprises at least one amino acid substitution as compared to SEQ ID NO: 9; infecting the muscle tissue with the rAAV, wherein the muscle tissue comprises a cardiac muscle tissue; and preferentially delivering the payload to the muscle tissue infected by the rAAV at a DNA enrichment of at least 25-fold greater than a wild type AAV9. 97. The method of embodiment 96, wherein the DNA enrichment is at least 30-fold greater than the wild type AAV9. 98. The method of embodiment 96 or embodiment 97, wherein the DNA enrichment is at least 50-fold greater than the wild type AAV9. 99. A method of transcribing a payload in a muscle tissue of a subject, the method comprising: administering a recombinant adeno-associated virus (rAAV) to the subject, wherein the rAAV encapsidates the payload, and wherein the rAAV comprises a VP capsid polypeptide comprising a 581-589 region corresponding to residues 581 to 589 of a VP1 polypeptide, wherein the 581-589 region comprises at least one amino acid substitution as compared to SEQ ID NO: 9; infecting the muscle tissue with the rAAV, wherein the muscle tissue comprises a cardiac muscle tissue; and preferentially transcribing the payload to the muscle tissue infected by the rAAV at an RNA enrichment of at least 10-fold greater than a wild type AAV9. 100. The method of embodiment 99, wherein the RNA enrichment is at least 20-fold greater than the wild type AAV9. 101. The method of embodiment 99 or embodiment 100, wherein the RNA enrichment is at least 40-fold greater than the wild type AAV9. 102. A method of delivering a payload to a muscle tissue of a subject, the method comprising: administering a recombinant adeno-associated virus (rAAV) to the subject, wherein the rAAV encapsidates the payload, and wherein the rAAV comprises a VP capsid polypeptide comprising a 581-589 region corresponding to residues 581 to 589 of a VP1 polypeptide, wherein the 581-589 region comprises at least one amino acid substitution as compared to SEQ ID NO: 9; infecting the muscle tissue with the rAAV, wherein the muscle tissue comprises a cardiac muscle tissue; and preferentially delivering the payload to the muscle tissue infected by the rAAV at a DNA enrichment of at least 5-fold greater than a wild type AAV5. 103. The method of embodiment 102, wherein the DNA enrichment is at least 10-fold greater than the wild type AAV5. 104. A method of transcribing a payload in a muscle tissue of a subject, the method comprising: administering a recombinant adeno-associated virus (rAAV) to the subject, wherein the rAAV encapsidates the payload, and wherein the rAAV comprises a VP capsid polypeptide comprising a 581-589 region corresponding to residues 581 to 589 of a VP1 polypeptide, wherein the 581-589 region comprises at least one amino acid substitution as compared to SEQ ID NO: 9; infecting the muscle tissue with the rAAV, wherein the muscle tissue comprises a cardiac muscle tissue; and preferentially transcribing the payload to the muscle tissue infected by the rAAV at an RNA enrichment of at least 5-fold greater than a wild type AAV5. 105. The method of embodiment 104, wherein the RNA enrichment is at least 10-fold greater than the wild type AAV5. 106. A method of delivering a payload to a muscle tissue of a subject, the method comprising: administering a recombinant adeno-associated virus (rAAV) to the subject, wherein the rAAV encapsidates the payload, and wherein the rAAV comprises a VP capsid polypeptide comprising a 581-589 region corresponding to residues 581 to 589 of a VP1 polypeptide, wherein the 581-589 region has a sequence that is at least 85% identical to: (a) SEQ ID NO: 348, (b) SEQ ID NO: 2536, (c) SEQ ID NO: 1576, (d) SEQ ID NO: 4955, (e) SEQ ID NO: 5017, (f) SEQ ID NO: 4349, (g) SEQ ID NO: 4964, (h) SEQ ID NO: 293, (i) SEQ ID NO: 4314, (j) SEQ ID NO: 4995, (k) SEQ ID NO: 4366, (l) SEQ ID NO: 4961, (m) SEQ ID NO: 4952, (n) SEQ ID NO: 5075, (o) SEQ ID NO: 4354, (p) SEQ ID NO: 5060, (q) SEQ ID NO: 5138, (r) SEQ ID NO: 5206, (s) SEQ ID NO: 4288, (t) SEQ ID NO: 5092, (u) SEQ ID NO: 4059, (v) SEQ ID NO: 4295, (w) SEQ ID NO: 5030, (x) SEQ ID NO: 4938, (y) SEQ ID NO: 2661, (z) SEQ ID NO: 5215, (aa) SEQ ID NO: 4960, (bb) SEQ ID NO: 4969, (cc) SEQ ID NO: 5023, or (dd) SEQ ID NO: 4934; infecting the muscle tissue with the rAAV, wherein the muscle tissue comprises cardiac muscle tissue; and delivering the payload to the muscle tissue infected by the rAAV. 107. A method of delivering a payload to a muscle tissue of a subject, the method comprising: administering a recombinant adeno-associated virus (rAAV) to the subject, wherein the rAAV encapsidates the payload, and wherein the rAAV comprises a VP capsid polypeptide comprising a 581-589 region corresponding to residues 581 to 589 of a VP1 polypeptide, wherein the 581-589 region comprises at least one amino acid substitution as compared to SEQ ID NO: 9; and infecting the muscle tissue with the rAAV, wherein the muscle tissue comprises a skeletal muscle tissue; preferentially delivering the payload to the muscle tissue infected by the rAAV at a DNA enrichment of at least 15-fold greater than a wild type AAV9. 108. The method of embodiment 107, wherein the DNA enrichment is at least 20-fold greater than the wild type AAV9. 109. The method of embodiment 107 or embodiment 108, wherein the DNA enrichment is at least 30-fold greater than the wild type AAV9. 110. A method of transcribing a payload in a muscle tissue of a subject, the method comprising: administering a recombinant adeno-associated virus (rAAV) to the subject, wherein the rAAV encapsidates the payload, and wherein the rAAV comprises a VP capsid polypeptide comprising a 581-589 region corresponding to residues 581 to 589 of a VP1 polypeptide, wherein the 581-589 region comprises at least one amino acid substitution as compared to SEQ ID NO: 9; infecting the muscle tissue with the rAAV, wherein the muscle tissue comprises a skeletal muscle tissue; and preferentially transcribing the payload to the muscle tissue infected by the rAAV at an RNA enrichment of at least 2-fold greater than a wild type AAV9. 111. The method of embodiment 110, wherein the RNA enrichment is at least 10-fold greater than the wild type AAV9. 112. The method of embodiment 110 or embodiment 111, wherein the RNA enrichment is at least 25-fold greater than the wild type AAV9. 113. A method of delivering a payload to a muscle tissue of a subject, the method comprising: administering a recombinant adeno-associated virus (rAAV) to the subject, wherein the rAAV encapsidates the payload, and wherein the rAAV comprises a VP capsid polypeptide comprising a 581-589 region corresponding to residues 581 to 589 of a VP1 polypeptide, wherein the 581-589 region comprises at least one amino acid substitution as compared to SEQ ID NO: 9; infecting the muscle tissue with the rAAV, wherein the muscle tissue comprises a skeletal muscle tissue; and preferentially delivering the payload to the muscle tissue infected by the rAAV at a DNA enrichment of at least 4-fold greater than a wild type AAV5. 114. The method of embodiment 113, wherein the DNA enrichment is at least 5-fold greater than the wild type AAV5. 115. A method of transcribing a payload in a muscle tissue of a subject, the method comprising: administering a recombinant adeno-associated virus (rAAV) to the subject, wherein the rAAV encapsidates the payload, and wherein the rAAV comprises a VP capsid polypeptide comprising a 581-589 region corresponding to residues 581 to 589 of a VP1 polypeptide, wherein the 581-589 region comprises at least one amino acid substitution as compared to SEQ ID NO: 9; infecting the muscle tissue with the rAAV, wherein the muscle tissue comprises a skeletal muscle tissue; and preferentially transcribing the payload to the muscle tissue infected by the rAAV at an RNA enrichment of at that of a wild type AAV5. 116. The method of embodiment 115, wherein the RNA enrichment is at least 3-fold greater than the wild type AAV5. 117. A method of delivering a payload to a muscle tissue of a subject, the method comprising: administering a recombinant adeno-associated virus (rAAV) to the subject, wherein the rAAV encapsidates the payload, and wherein the rAAV comprises a VP capsid polypeptide comprising a 581-589 region corresponding to residues 581 to 589 of a VP1 polypeptide, wherein the 581-589 region has a sequence that is at least 85% identical to: (a) SEQ ID NO: 3472, (b) SEQ ID NO: 3297, (c) SEQ ID NO: 2661, (d) SEQ ID NO: 4545, (e) SEQ ID NO: 348, (f) SEQ ID NO: 18, (g) SEQ ID NO: 4349, (h) SEQ ID NO: 293, (i) SEQ ID NO: 5017, (j) SEQ ID NO: 4955, (k) SEQ ID NO: 4366, (l) SEQ ID NO: 5092, (m) SEQ ID NO: 210, (n) SEQ ID NO: 4059, (o) SEQ ID NO: 2536, (p) SEQ ID NO: 5206, (q) SEQ ID NO: 1971, (r) SEQ ID NO: 262, (s) SEQ ID NO: 4343, or (t) SEQ ID NO: 4995, (u) SEQ ID NO: 4009, (v) SEQ ID NO: 5190, (w) SEQ ID NO: 724, (x) SEQ ID NO: 4288, (y) SEQ ID NO: 4973, (z) SEQ ID NO: 4314, (aa) SEQ ID NO: 1561, (bb) SEQ ID NO: 5147, (cc) SEQ ID NO: 4238, or (dd) SEQ ID NO: 4961; infecting the muscle tissue with the rAAV, wherein the muscle tissue comprises skeletal muscle tissue; and delivering the payload to the muscle tissue infected by the rAAV. 118. A method of delivering a payload to a muscle tissue of a subject, the method comprising: administering a recombinant adeno-associated virus (rAAV) to the subject, wherein the rAAV encapsidates the payload, and wherein the rAAV comprises a VP capsid polypeptide comprising a 581-589 region corresponding to residues 581 to 589 of a VP1 polypeptide, wherein the 581-589 region comprises at least one amino acid substitution as compared to SEQ ID NO: 9; infecting the muscle tissue with the rAAV; and preferentially delivering the payload to the muscle tissue infected by the rAAV at a DNA enrichment of at least 20-fold greater than a wild type AAV9. 119. The method of embodiment 118, wherein the DNA enrichment is at least 25-fold greater than the wild type AAV9. 120. The method of embodiment 118 or embodiment 119, wherein the DNA enrichment is at least 30-fold greater than the wild type AAV9. 121. A method of transcribing a payload in a muscle tissue of a subject, the method comprising: administering a recombinant adeno-associated virus (rAAV) to the subject, wherein the rAAV encapsidates the payload, and wherein the rAAV comprises a VP capsid polypeptide comprising a 581-589 region corresponding to residues 581 to 589 of a VP1 polypeptide, wherein the 581-589 region comprises at least one amino acid substitution as compared to SEQ ID NO: 9; infecting the muscle tissue with the rAAV; and preferentially transcribing the payload to the muscle tissue infected by the rAAV at an RNA enrichment of at least 5-fold greater than a wild type AAV9. 122. The method of embodiment 121, wherein the RNA enrichment is at least 10-fold greater than the wild type AAV9. 123. The method of embodiment 121 or embodiment 122, wherein the RNA enrichment is at least 100-fold greater than the wild type AAV9. 124. A method of delivering a payload to a muscle tissue of a subject, the method comprising: administering a recombinant adeno-associated virus (rAAV) to the subject, wherein the rAAV encapsidates the payload, and wherein the rAAV comprises a VP capsid polypeptide comprising a 581-589 region corresponding to residues 581 to 589 of a VP1 polypeptide, wherein the 581-589 region comprises at least one amino acid substitution as compared to SEQ ID NO: 9; infecting the muscle tissue with the rAAV; and preferentially delivering the payload to the muscle tissue infected by the rAAV at a DNA enrichment of at least 5-fold greater than a wild type AAV5. 125. The method of embodiment 124, wherein the DNA enrichment is at least 10-fold greater than the wild type AAV5. 126. A method of transcribing a payload in a muscle tissue of a subject, the method comprising: administering a recombinant adeno-associated virus (rAAV) to the subject, wherein the rAAV encapsidates the payload, and wherein the rAAV comprises a VP capsid polypeptide comprising a 581-589 region corresponding to residues 581 to 589 of a VP1 polypeptide, wherein the 581-589 region comprises at least one amino acid substitution as compared to SEQ ID NO: 9; infecting the muscle tissue with the rAAV; and preferentially transcribing the payload to the muscle tissue infected by the rAAV at an RNA enrichment of at least that of a wild type AAV5. 127. The method of embodiment 126, wherein the RNA enrichment is at least 2-fold greater than the wild type AAV5. 128. A method of delivering a payload to a muscle tissue of a subject, the method comprising: administering a recombinant adeno-associated virus (rAAV) to the subject, wherein the rAAV encapsidates the payload, and wherein the rAAV comprises a VP capsid polypeptide comprising a 581-589 region corresponding to residues 581 to 589 of a VP1 polypeptide, wherein the 581-589 region has a sequence that is at least 85% identical to: (a) SEQ ID NO: 348, (b) SEQ ID NO: 2536, (c) SEQ ID NO: 4955, (d) SEQ ID NO: 5017, (e) SEQ ID NO: 4349, (f) SEQ ID NO: 293, (g) SEQ ID NO: 1576, (h) SEQ ID NO: 2661, (i) SEQ ID NO: 4964, (j) SEQ ID NO: 4314, (k) SEQ ID NO: 4995, (l) SEQ ID NO: 4366, (m) SEQ ID NO: 4545, (n) SEQ ID NO: 4961, (o) SEQ ID NO: 5206, (p) SEQ ID NO: 5092, (q) SEQ ID NO: 3472, (r) SEQ ID NO: 5075, (s) SEQ ID NO: 4059, (t) SEQ ID NO: 4354, (u) SEQ ID NO: 5060, (v) SEQ ID NO: 4288, (w) SEQ ID NO: 4952, (x) SEQ ID NO: 5138, (y) SEQ ID NO: 18, (z) SEQ ID NO: 5030, (aa) SEQ ID NO: 3297, (bb) SEQ ID NO: 4295, (cc) SEQ ID NO: 4363, or (dd) SEQ ID NO: 4963; infecting the muscle tissue with the rAAV; and delivering the payload to the muscle tissue infected by the rAAV. 129. A method of delivering a payload to a muscle tissue of a subject, the method comprising: administering a recombinant adeno-associated virus (rAAV) to the subject, wherein the rAAV encapsidates the payload, and wherein the rAAV comprises a VP capsid polypeptide comprising a 581-589 region corresponding to residues 581 to 589 of a VP1 polypeptide, wherein the 581-589 region comprises at least one amino acid substitution as compared to residues 581 to 589 of SEQ ID NO: 1, and wherein the VP capsid polypeptide comprises at least one amino acid substitution as compared to each of SEQ ID NO: 3, SEQ ID NO: 4, SEQ ID NO: 5, SEQ ID NO: 6, SEQ ID NO: 7, and SEQ ID NO: 8; infecting the muscle tissue with the rAAV with at least 3-fold higher muscle tissue tropism as compared to a wild type AAV5 capsid comprising a peptide of SEQ ID NO: 1; and delivering the payload to the muscle tissue infected by the rAAV. 130. A method of delivering a payload to a muscle tissue of a subject, the method comprising: administering a recombinant adeno-associated virus (rAAV) to the subject, wherein the rAAV encapsidates the payload, and wherein the rAAV comprises a VP capsid polypeptide of any one of embodiments 1-84; infecting the muscle tissue with the rAAV; and delivering the payload to the muscle tissue infected by the rAAV. 131. The method of any one of embodiments 128-130, wherein the muscle tissue comprises aorta, esophagus, heart, skeletal muscle, or a combination thereof 132. The method of any one of embodiments 96-131, further comprising expressing a therapeutic polypeptide or a therapeutic polynucleotide encoded by the payload in the muscle tissue infected by the rAAV. 133. The method of any one of embodiments 96-132, further comprising producing a therapeutic effect in the muscle tissue of the subject. 134. The method of embodiment 133, wherein the therapeutic effect is produced upon administration of from 1×10⁵ to 5×10¹⁴ rAAVs per kg subject weight. 135. The method of embodiment 133 or embodiment 134, comprising administering an amount of the rAAV sufficient to produce the therapeutic effect without producing a toxicity in the subject. 136. A method of treating a condition in a subject, the method comprising: administering a recombinant adeno-associated virus (rAAV) to the subject, wherein the rAAV encapsidates the payload, and wherein the rAAV comprises a VP capsid polypeptide comprising a 581-589 region corresponding to residues 581 to 589 of a VP1 polypeptide, wherein the 581-589 region comprises at least one amino acid substitution as compared to SEQ ID NO: 9; infecting a muscle tissue of the subject with the rAAV, wherein the muscle tissue comprises a cardiac muscle tissue; preferentially delivering the payload to the muscle tissue infected by the rAAV at a DNA enrichment of at least 25-fold greater than a wild type AAV9; and producing a therapeutic effect in the muscle tissue, thereby treating the condition. 137. The method of embodiment 136, wherein the DNA enrichment is at least 30-fold greater than the wild type AAV9. 138. The method of embodiment 136 or embodiment 137, wherein the DNA enrichment is at least 50-fold greater than the wild type AAV9. 139. A method of treating a condition in a subject, the method comprising: administering a recombinant adeno-associated virus (rAAV) to the subject, wherein the rAAV encapsidates the payload, and wherein the rAAV comprises a VP capsid polypeptide comprising a 581-589 region corresponding to residues 581 to 589 of a VP1 polypeptide, wherein the 581-589 region comprises at least one amino acid substitution as compared to SEQ ID NO: 9; infecting a muscle tissue of the subject with the rAAV, wherein the muscle tissue comprises a cardiac muscle tissue; preferentially transcribing the payload to the muscle tissue infected by the rAAV at an RNA enrichment of at least 10-fold greater than a wild type AAV9; and producing a therapeutic effect in the muscle tissue, thereby treating the condition. 140. The method of embodiment 139, wherein the RNA enrichment is at least 20-fold greater than the wild type AAV9. 141. The method of embodiment 139 or embodiment 140, wherein the RNA enrichment is at least 40-fold greater than the wild type AAV9. 142. A method of treating a condition in a subject, the method comprising: administering a recombinant adeno-associated virus (rAAV) to the subject, wherein the rAAV encapsidates the payload, and wherein the rAAV comprises a VP capsid polypeptide comprising a 581-589 region corresponding to residues 581 to 589 of a VP1 polypeptide, wherein the 581-589 region comprises at least one amino acid substitution as compared to SEQ ID NO: 9; infecting a muscle tissue of the subject with the rAAV, wherein the muscle tissue comprises a cardiac muscle tissue; preferentially delivering the payload to the muscle tissue infected by the rAAV at a DNA enrichment of at least 5-fold greater than a wild type AAV5; and producing a therapeutic effect in the muscle tissue, thereby treating the condition. 143. The method of embodiment 142, wherein the DNA enrichment is at least 10-fold greater than the wild type AAV5. 144. A method of treating a condition in a subject, the method comprising: administering a recombinant adeno-associated virus (rAAV) to the subject, wherein the rAAV encapsidates the payload, and wherein the rAAV comprises a VP capsid polypeptide comprising a 581-589 region corresponding to residues 581 to 589 of a VP1 polypeptide, wherein the 581-589 region comprises at least one amino acid substitution as compared to SEQ ID NO: 9; infecting a muscle tissue of the subject with the rAAV, wherein the muscle tissue comprises a cardiac muscle tissue; preferentially transcribing the payload to the muscle tissue infected by the rAAV at an RNA enrichment of at least 5-fold greater than a wild type AAV5; and producing a therapeutic effect in the muscle tissue, thereby treating the condition. 145. The method of embodiment 144, wherein the RNA enrichment is at least 10-fold greater than the wild type AAV5. 146. A method of treating a condition in a subject, the method comprising: administering a recombinant adeno-associated virus (rAAV) to the subject, wherein the rAAV encapsidates a payload, and wherein the rAAV comprises a VP capsid polypeptide comprising a 581-589 region corresponding to residues 581 to 589 of a VP1 polypeptide, wherein the 581-589 region has a sequence that is at least 85% identical to: (a) SEQ ID NO: 348, (b) SEQ ID NO: 2536, (c) SEQ ID NO: 1576, (d) SEQ ID NO: 4955, (e) SEQ ID NO: 5017, (f) SEQ ID NO: 4349, (g) SEQ ID NO: 4964, (h) SEQ ID NO: 293, (i) SEQ ID NO: 4314, (j) SEQ ID NO: 4995, (k) SEQ ID NO: 4366, (l) SEQ ID NO: 4961, (m) SEQ ID NO: 4952, (n) SEQ ID NO: 5075, (o) SEQ ID NO: 4354, (p) SEQ ID NO: 5060, (q) SEQ ID NO: 5138, (r) SEQ ID NO: 5206, (s) SEQ ID NO: 4288, (t) SEQ ID NO: 5092, (u) SEQ ID NO: 4059, (v) SEQ ID NO: 4295, (w) SEQ ID NO: 5030, (x) SEQ ID NO: 4938, (y) SEQ ID NO: 2661, (z) SEQ ID NO: 5215, (aa) SEQ ID NO: 4960, (bb) SEQ ID NO: 4969, (cc) SEQ ID NO: 5023, or (dd) SEQ ID NO: 4934; infecting a muscle tissue of the subject with the rAAV, wherein the muscle tissue comprises cardiac muscle tissue; delivering the payload to the muscle tissue infected by the rAAV; and producing a therapeutic effect in the muscle tissue, thereby treating the condition. 147. A method of treating a condition in a subject, the method comprising: administering a recombinant adeno-associated virus (rAAV) to the subject, wherein the rAAV encapsidates the payload, and wherein the rAAV comprises a VP capsid polypeptide comprising a 581-589 region corresponding to residues 581 to 589 of a VP1 polypeptide, wherein the 581-589 region comprises at least one amino acid substitution as compared to SEQ ID NO: 9; infecting a muscle tissue of the subject with the rAAV, wherein the muscle tissue comprises a skeletal muscle tissue; preferentially delivering the payload to the muscle tissue infected by the rAAV at a DNA enrichment of at least 15-fold greater than a wild type AAV9; and producing a therapeutic effect in the muscle tissue, thereby treating the condition. 148. The method of embodiment 147, wherein the DNA enrichment is at least 20-fold greater than the wild type AAV9. 149. The method of embodiment 147 or embodiment 148, wherein the DNA enrichment is at least 30-fold greater than the wild type AAV9. 150. A method of treating a condition in a subject, the method comprising: administering a recombinant adeno-associated virus (rAAV) to the subject, wherein the rAAV encapsidates the payload, and wherein the rAAV comprises a VP capsid polypeptide comprising a 581-589 region corresponding to residues 581 to 589 of a VP1 polypeptide, wherein the 581-589 region comprises at least one amino acid substitution as compared to SEQ ID NO: 9; infecting a muscle tissue of the subject with the rAAV, wherein the muscle tissue comprises a skeletal muscle tissue; preferentially transcribing the payload to the muscle tissue infected by the rAAV at an RNA enrichment of at least 2-fold greater than a wild type AAV9. 151. The method of embodiment 150, wherein the RNA enrichment is at least 10-fold greater than the wild type AAV9. 152. The method of embodiment 150 or embodiment 151, wherein the RNA enrichment is at least 25-fold greater than the wild type AAV9. 153. A method of treating a condition in a subject, the method comprising: administering a recombinant adeno-associated virus (rAAV) to the subject, wherein the rAAV encapsidates the payload, and wherein the rAAV comprises a VP capsid polypeptide comprising a 581-589 region corresponding to residues 581 to 589 of a VP1 polypeptide, wherein the 581-589 region comprises at least one amino acid substitution as compared to SEQ ID NO: 9; infecting a muscle tissue of the subject with the rAAV, wherein the muscle tissue comprises a skeletal muscle tissue; preferentially delivering the payload to the muscle tissue infected by the rAAV at a DNA enrichment of at least 4-fold greater than a wild type AAV5; and producing a therapeutic effect in the muscle tissue, thereby treating the condition. 154. The method of embodiment 153, wherein the DNA enrichment is at least 5-fold greater than the wild type AAV5. 155. A method of treating a condition in a subject, the method comprising: administering a recombinant adeno-associated virus (rAAV) to the subject, wherein the rAAV encapsidates the payload, and wherein the rAAV comprises a VP capsid polypeptide comprising a 581-589 region corresponding to residues 581 to 589 of a VP1 polypeptide, wherein the 581-589 region comprises at least one amino acid substitution as compared to SEQ ID NO: 9; infecting a muscle tissue of the subject with the rAAV, wherein the muscle tissue comprises a skeletal muscle tissue; preferentially transcribing the payload to the muscle tissue infected by the rAAV at an RNA enrichment of at that of a wild type AAV5; and producing a therapeutic effect in the muscle tissue, thereby treating the condition. 156. The method of embodiment 155, wherein the RNA enrichment is at least 3-fold greater than the wild type AAV5. 157. A method of treating a condition in a subject, the method comprising: administering a recombinant adeno-associated virus (rAAV) to the subject, wherein the rAAV encapsidates a payload, and wherein the rAAV comprises a VP capsid polypeptide comprising a 581-589 region corresponding to residues 581 to 589 of a VP1 polypeptide, wherein the 581-589 region has a sequence that is at least 85% identical to: (a) SEQ ID NO: 3472, (b) SEQ ID NO: 3297, (c) SEQ ID NO: 2661, (d) SEQ ID NO: 4545, (e) SEQ ID NO: 348, (f) SEQ ID NO: 18, (g) SEQ ID NO: 4349, (h) SEQ ID NO: 293, (i) SEQ ID NO: 5017, (j) SEQ ID NO: 4955, (k) SEQ ID NO: 4366, (l) SEQ ID NO: 5092, (m) SEQ ID NO: 210, (n) SEQ ID NO: 4059, (o) SEQ ID NO: 2536, (p) SEQ ID NO: 5206, (q) SEQ ID NO: 1971, (r) SEQ ID NO: 262, (s) SEQ ID NO: 4343, (t) SEQ ID NO: 4995, (u) SEQ ID NO: 4009, (v) SEQ ID NO: 5190, (w) SEQ ID NO: 724, (x) SEQ ID NO: 4288, (y) SEQ ID NO: 4973, (z) SEQ ID NO: 4314, (aa) SEQ ID NO: 1561, (bb) SEQ ID NO: 5147, (cc) SEQ ID NO: 4238, or (dd) SEQ ID NO: 4961; infecting a muscle tissue of the subject with the rAAV, wherein the muscle tissue comprises skeletal muscle tissue; delivering the payload to the muscle tissue infected by the rAAV; and producing a therapeutic effect in the muscle tissue, thereby treating the condition. 158. A method of treating a condition in a subject, the method comprising: administering a recombinant adeno-associated virus (rAAV) to the subject, wherein the rAAV encapsidates the payload, and wherein the rAAV comprises a VP capsid polypeptide comprising a 581-589 region corresponding to residues 581 to 589 of a VP1 polypeptide, wherein the 581-589 region comprises at least one amino acid substitution as compared to SEQ ID NO: 9; infecting a muscle tissue of the subject with the rAAV; preferentially delivering the payload to the muscle tissue infected by the rAAV at a DNA enrichment of at least 20-fold greater than a wild type AAV9; and producing a therapeutic effect in the muscle tissue, thereby treating the condition. 159. The method of embodiment 158, wherein the DNA enrichment is at least 25-fold greater than the wild type AAV9. 160. The method of embodiment 158 or embodiment 159, wherein the DNA enrichment is at least 30-fold greater than the wild type AAV9. 161. A method of treating a condition in a subject, the method comprising: administering a recombinant adeno-associated virus (rAAV) to the subject, wherein the rAAV encapsidates the payload, and wherein the rAAV comprises a VP capsid polypeptide comprising a 581-589 region corresponding to residues 581 to 589 of a VP1 polypeptide, wherein the 581-589 region comprises at least one amino acid substitution as compared to SEQ ID NO: 9; infecting a muscle tissue of the subject with the rAAV; preferentially transcribing the payload to the muscle tissue infected by the rAAV at an RNA enrichment of at least 5-fold greater than a wild type AAV9; and producing a therapeutic effect in the muscle tissue, thereby treating the condition. 162. The method of embodiment 161, wherein the RNA enrichment is at least 10-fold greater than the wild type AAV9. 163. The method of embodiment 161 or embodiment 162, wherein the RNA enrichment is at least 100-fold greater than the wild type AAV9. 164. A method of treating a condition in a subject, the method comprising: administering a recombinant adeno-associated virus (rAAV) to the subject, wherein the rAAV encapsidates the payload, and wherein the rAAV comprises a VP capsid polypeptide comprising a 581-589 region corresponding to residues 581 to 589 of a VP1 polypeptide, wherein the 581-589 region comprises at least one amino acid substitution as compared to SEQ ID NO: 9; infecting a muscle tissue of the subject with the rAAV; preferentially delivering the payload to the muscle tissue infected by the rAAV at a DNA enrichment of at least 5-fold greater than a wild type AAV5; and producing a therapeutic effect in the muscle tissue, thereby treating the condition. 165. The method of embodiment 164, wherein the DNA enrichment is at least 10-fold greater than the wild type AAV5. 166. A method of treating a condition in a subject, the method comprising: administering a recombinant adeno-associated virus (rAAV) to the subject, wherein the rAAV encapsidates the payload, and wherein the rAAV comprises a VP capsid polypeptide comprising a 581-589 region corresponding to residues 581 to 589 of a VP1 polypeptide, wherein the 581-589 region comprises at least one amino acid substitution as compared to SEQ ID NO: 9; infecting the muscle tissue with the rAAV; preferentially transcribing the payload to the muscle tissue infected by the rAAV at an RNA enrichment of at least that of a wild type AAV5; and producing a therapeutic effect in the muscle tissue, thereby treating the condition. 167. The method of embodiment 166, wherein the RNA enrichment is at least 2-fold greater than the wild type AAV5. 168. A method of treating a condition in a subject, the method comprising: administering a recombinant adeno-associated virus (rAAV) to the subject, wherein the rAAV encapsidates a payload, and wherein the rAAV comprises a VP capsid polypeptide comprising a 581-589 region corresponding to residues 581 to 589 of a VP1 polypeptide, wherein the 581-589 region has a sequence that is at least 85% identical to: (a) SEQ ID NO: 348, (b) SEQ ID NO: 2536, (c) SEQ ID NO: 4955, (d) SEQ ID NO: 5017, (e) SEQ ID NO: 4349, (f) SEQ ID NO: 293, (g) SEQ ID NO: 1576, (h) SEQ ID NO: 2661, (i) SEQ ID NO: 4964, (j) SEQ ID NO: 4314, (k) SEQ ID NO: 4995, (l) SEQ ID NO: 4366, (m) SEQ ID NO: 4545, (n) SEQ ID NO: 4961, (o) SEQ ID NO: 5206, (p) SEQ ID NO: 5092, (q) SEQ ID NO: 3472, (r) SEQ ID NO: 5075, (s) SEQ ID NO: 4059, (t) SEQ ID NO: 4354, (u) SEQ ID NO: 5060, (v) SEQ ID NO: 4288, (w) SEQ ID NO: 4952, (x) SEQ ID NO: 5138, (y) SEQ ID NO: 18, (z) SEQ ID NO: 5030, (aa) SEQ ID NO: 3297, (bb) SEQ ID NO: 4295, (cc) SEQ ID NO: 4363, or (dd) SEQ ID NO: 4963; infecting a muscle tissue of the subject with the rAAV; delivering the payload to the muscle tissue infected by the rAAV; and producing a therapeutic effect in the muscle tissue, thereby treating the condition. 169. A method of treating a condition in a subject, the method comprising: administering a recombinant adeno-associated virus (rAAV) to the subject, wherein the rAAV encapsidates a payload, and wherein the rAAV comprises a VP capsid polypeptide a 581-589 region corresponding to residues 581 to 589 of a VP1 polypeptide, wherein the 581-589 region comprises at least one amino acid substitution as compared to residues 581 to 589 of SEQ ID NO: 1, and wherein the VP capsid polypeptide does not have the sequence of any of SEQ ID NO: 3, SEQ ID NO: 4, SEQ ID NO: 5, SEQ ID NO: 6, SEQ ID NO: 7, or SEQ ID NO: 8; infecting a muscle tissue of the subject with the rAAV with at least 3-fold higher muscle tissue tropism as compared to a wild type AAV5 capsid comprising a peptide of SEQ ID NO: 1; delivering the payload to the muscle tissue infected by the rAAV; and producing a therapeutic effect in the muscle tissue, thereby treating the condition. 170. A method of treating a condition in a subject, the method comprising: administering a recombinant adeno-associated virus (rAAV) to the subject, wherein the rAAV encapsidates a payload, and wherein the rAAV comprises a VP capsid polypeptide of any one of embodiments 1-84; infecting a muscle tissue of the subject with the rAAV; delivering the payload to the muscle tissue infected by the rAAV; and producing a therapeutic effect in the muscle tissue, thereby treating the condition. 171. The method of any one of embodiments 136-170, wherein the condition is a muscle condition. 172. The method of embodiment 171, wherein the muscle condition is a vascular condition, a cardiac condition, a skeletal muscle condition, Charcot-Marie-Tooth disease, Duchenne muscular dystrophy, facioscapulohumeral muscular dystrophy, dysferlinopathy, Pompe disease, limb-girdle muscular dystrophy, myotonic dystrophy, a glycogen storage disorder, X-linked myotubular myopathy, or euchromatic histone-lysine N-methyltransferase 2. 173. The method of any one of embodiments 136-172, wherein the condition is facioscapulohumeral muscular dystrophy syndrome. 174. The method of embodiment 173, wherein the payload encodes DUX4 or a guide RNA or miRNA that targets an mRNA encoding DUX4. 175. The method of any one of embodiments 136-172, wherein the condition is Duchenne muscular dystrophy. 176. The method of embodiment 175, wherein the payload encodes dystrophin or a guide RNA or miRNA that targets an mRNA encoding dystrophin. 177. The method of any one of embodiments 136-176, comprising administering from 1×10⁵ to 5×10¹⁴ rAAVs per kg subject weight. 178. The method of any one of embodiments 96-177, comprising infecting the muscle tissue with at least 2.5-fold, at least 3-fold, at least 3.5-fold, at least 4-fold, at least 5-fold, at least 10-fold, at least 20-fold, at least 50-fold, at least 75-fold, at least 100-fold, at least 200-fold, at least 500-fold, or at least 1000-fold higher tissue tropism than a wild type AAV5 capsid comprising a peptide of SEQ ID NO: 1. 179. The method of any one of embodiments 96-178, wherein the payload encodes a therapeutic protein, therapeutic polynucleotide, a guide RNA, a tRNA, a suppressor tRNA, a siRNA, a miRNA, an mRNA, a shRNA, a circular RNA, an antisense oligonucleotide (ASO), a ribozyme, a DNAzyme, an aptamer, or any combination thereof 180. The method of embodiment 179, wherein the guide RNA is a CRISPR/Cas guide RNA or an ADAR guide RNA. 181. The method of embodiment 179, wherein the therapeutic protein is selected from the group consisting of neurotrophin-3, micro-dystrophin, mini-dystrophin, double homeobox 4 (DUX4), dysferlin, α-glucosidase, FKRP, dystrophin, myotonin-protein kinase, glycogen synthase, myotubularin, and EHMT2. 182. The method embodiment 179, wherein the therapeutic polynucleotide targets an mRNA encoding a protein selected from the group consisting of neurotrophin-3, micro-dystrophin, mini-dystrophin, double homeobox 4 (DUX4), dysferlin, α-glucosidase, FKRP, dystrophin, myotonin-protein kinase, glycogen synthase, myotubularin, and EHMT2. 183. The method of any one of embodiments 96-182, wherein the payload encodes a component of a CRISPR/Cas system, an adenosine deaminase acting on RNA (ADAR) enzyme, a transcriptional activator, or a transcriptional repressor. 184. The method of embodiment 183, wherein the component of the CRISPR/Cas system comprises a Cas3, a Cas8, a Cas10, a Cas9, a Cas4, a Cas12, a Cas13, a guide RNA, or a combination thereof. 185. The method of embodiment 183, wherein the ADAR enzyme is ADAR1 or ADAR2. 186. The method of embodiment 183, wherein the transcriptional activator is VP64. 187. The method of embodiment 183, wherein the transcriptional repressor is KRAB. 188. The method of any one of embodiments 96-187, comprising systemically administering the rAAV to the subject. 189. The method of any one of embodiments 96-188, comprising administering the rAAV via intravenous administration, intramuscular administration, intraperitoneal administration, or oral administration. 190. The method of any one of embodiments 96-189, further comprising expressing a therapeutic polypeptide or a therapeutic polynucleotide encoded by the payload in the muscle tissue infected by the rAAV. 191. The method of embodiment 190, comprising expressing the therapeutic polypeptide or the therapeutic polynucleotide with higher muscle tissue tropism compared to a wild type AAV5 capsid comprising a peptide of SEQ ID NO: 1. 192. The method of embodiment 191, comprising expressing the therapeutic polypeptide or the therapeutic polynucleotide with at least 3-fold, at least 3.5-fold, at least 4-fold, at least 5-fold, at least 10-fold, at least 20-fold, at least 50-fold, at least 75-fold, at least 100-fold, at least 200-fold, at least 500-fold higher, or at least 1000-fold higher tropism compared to the wild type AAV5 capsid. 193. The method of any one of embodiments 96-192, comprising producing a toxicity in the subject that is lower than a toxicity produced upon systemic administration of a comparable number of wild type AAV5 capsids comprising a VP capsid polypeptide of SEQ ID NO: 1. 194. The method of any one of embodiments 96-193, comprising producing a toxicity in the subject that is lower than a toxicity produced upon systemic administration of a number of wild type AAV5 capsids comprising a VP capsid polypeptide of SEQ ID NO: 1 sufficient to deliver a comparable number of payloads to the muscle tissue. 195. The method of any one of embodiments 96-194, comprising producing a concentration of neutralizing antibodies in the subject that is lower than a concentration of neutralizing antibodies produced upon systemic administration of a comparable number of wild type AAV5 capsids comprising a VP capsid polypeptide of SEQ ID NO: 1. 196. The method of any one of embodiments 96-195, comprising producing a concentration of neutralizing antibodies in the subject that is lower than a concentration of neutralizing antibodies produced upon intravitreal administration of a comparable number of wild type AAV2 capsids. 197. The method of any one of embodiments 96-196, comprising producing a concentration of neutralizing antibodies in the subject that is lower than a concentration of neutralizing antibodies produced upon intravitreal administration of a comparable number of wild type AAV8 capsids. 198. The method of any one of embodiments 96-197, comprising producing a concentration of neutralizing antibodies in the subject that is lower than a concentration of neutralizing antibodies produced upon intravitreal administration of a comparable number of wild type AAV9 capsids. 199. The method of any one of embodiments 96-198, wherein the VP capsid polypeptide further comprises one or more mutations outside of the 581-589 region that contributes to reduced production of neutralizing antibodies relative to a wild type AAV capsid. 200. The method of any one of embodiments 96-199, comprising producing a concentration of neutralizing antibodies in the subject that is lower than a concentration of neutralizing antibodies produced upon systemic administration of a number of wild type AAV5 capsids comprising a VP capsid polypeptide of SEQ ID NO: 1 sufficient to deliver a comparable number of payloads to the muscle tissue. 201. A viral protein (VP) capsid polypeptide, wherein the VP capsid polypeptide comprises a 581-589 region corresponding to residues 581 to 589 a VP1 polypeptide, wherein the 581-589 region comprises at least one amino acid substitution as compared to SEQ ID NO: 9, and wherein a recombinant viral capsid comprising the VP capsid polypeptide is capable of preferentially targeting cardiac muscle tissue and a skeletal muscle tissue. 202. The VP capsid polypeptide of embodiment 201, wherein the 581-589 region has a sequence having at least 85% sequence identity to a sequence selected from the group consisting of SEQ ID NO: 348, SEQ ID NO: 2536, SEQ ID NO: 5607, SEQ ID NO: 4955, SEQ ID NO: 5017, SEQ ID NO: 4349, SEQ ID NO: 4964, SEQ ID NO: 293, SEQ ID NO: 4314, SEQ ID NO: 4995, SEQ ID NO: 4366, SEQ ID NO: 4961, SEQ ID NO: 4952, SEQ ID NO: 5075, SEQ ID NO: 4354, SEQ ID NO: 5060, SEQ ID NO: 5138, SEQ ID NO: 5206, SEQ ID NO: 4288, SEQ ID NO: 5283, SEQ ID NO: 5092, SEQ ID NO: 4059, SEQ ID NO: 4295, SEQ ID NO: 5030, SEQ ID NO: 2661, SEQ ID NO: 4545, SEQ ID NO: 4963, SEQ ID NO: 4363, SEQ ID NO: 5159, SEQ ID NO: 4973, SEQ ID NO: 5157, SEQ ID NO: 4345, SEQ ID NO: 5039, SEQ ID NO: 4304, SEQ ID NO: 18, SEQ ID NO: 386, SEQ ID NO: 308, SEQ ID NO: 278, SEQ ID NO: 5037, SEQ ID NO: 4361, SEQ ID NO: 4317, SEQ ID NO: 4343, SEQ ID NO: 4311, SEQ ID NO: 5055, SEQ ID NO: 4359, SEQ ID NO: 4353, and SEQ ID NO: 4346. 203. The VP capsid polypeptide of embodiment 201 or embodiment 202, wherein the 581-589 region has a sequence selected from the group consisting of SEQ ID NO: 348, SEQ ID NO: 2536, SEQ ID NO: 5607, SEQ ID NO: 4955, SEQ ID NO: 5017, SEQ ID NO: 4349, SEQ ID NO: 4964, SEQ ID NO: 293, SEQ ID NO: 4314, SEQ ID NO: 4995, SEQ ID NO: 4366, SEQ ID NO: 4961, SEQ ID NO: 4952, SEQ ID NO: 5075, SEQ ID NO: 4354, SEQ ID NO: 5060, SEQ ID NO: 5138, SEQ ID NO: 5206, SEQ ID NO: 4288, SEQ ID NO: 5283, SEQ ID NO: 5092, SEQ ID NO: 4059, SEQ ID NO: 4295, SEQ ID NO: 5030, SEQ ID NO: 2661, SEQ ID NO: 4545, SEQ ID NO: 4963, SEQ ID NO: 4363, SEQ ID NO: 5159, SEQ ID NO: 4973, SEQ ID NO: 5157, SEQ ID NO: 4345, SEQ ID NO: 5039, SEQ ID NO: 4304, SEQ ID NO: 18, SEQ ID NO: 386, SEQ ID NO: 308, SEQ ID NO: 278, SEQ ID NO: 5037, SEQ ID NO: 4361, SEQ ID NO: 4317, SEQ ID NO: 4343, SEQ ID NO: 4311, SEQ ID NO: 5055, SEQ ID NO: 4359, SEQ ID NO: 4353, and SEQ ID NO: 4346. 204. A viral protein (VP) capsid polypeptide, wherein the VP capsid polypeptide comprises a 581-589 region corresponding to residues 581 to 589 of a VP1 polypeptide; wherein the 581-589 region has a sequence that is at least 85% identical to: (a) SEQ ID NO: 5027, (b) SEQ ID NO: 4633, (c) SEQ ID NO: 4943, (d) SEQ ID NO: 386, (e) SEQ ID NO: 334, (f) SEQ ID NO: 4309, (g) SEQ ID NO: 4288, (h) SEQ ID NO: 4964, (i) SEQ ID NO: 5017, (j) SEQ ID NO: 5814, (k) SEQ ID NO: 4335, (l) SEQ ID NO: 348, (m) SEQ ID NO: 4936, (n) SEQ ID NO: 5206, (o) SEQ ID NO: 4238, (p) SEQ ID NO: 5077, or (q) SEQ ID NO: 5603. 205. The VP capsid polypeptide of embodiment 204, wherein the 581-589 region has a sequence of: (a) SEQ ID NO: 5027, (b) SEQ ID NO: 4633, (c) SEQ ID NO: 4943, (d) SEQ ID NO: 386, (e) SEQ ID NO: 334, (f) SEQ ID NO: 4309, (g) SEQ ID NO: 4288, (h) SEQ ID NO: 4964, (i) SEQ ID NO: 5017, (j) SEQ ID NO: 5814, (k) SEQ ID NO: 4335, (l) SEQ ID NO: 348, (m) SEQ ID NO: 4936, (n) SEQ ID NO: 5206, (o) SEQ ID NO: 4238, (p) SEQ ID NO: 5077, or (q) SEQ ID NO: 5603. 206. The VP capsid polypeptide of embodiment 204 or embodiment 205, wherein the 581-589 region confers cardiac tissue tropism in mice and non-human primates. 207. A research method comprising administering a recombinant adeno-associated virus (rAAV) to a model organism, wherein the rAAV comprises a VP capsid polypeptide of any one of embodiments 204-206. 208. The research method of embodiment 207, further comprising evaluating an effect of the rAAV in the model organism. 209. The research method of embodiment 208, wherein the model organism is a mouse. 210. The research method of embodiment 208 or embodiment 209, further comprising inferring an effect of the rAAV in an organism of interest based on the effect of the rAAV in the model organism. 211. The research method of embodiment 210, wherein the organism of interest is a non-human primate or a human. 212. A viral protein (VP) capsid polypeptide, wherein the VP capsid polypeptide comprises a 581-589 region corresponding to residues 581 to 589 of a VP1 polypeptide; wherein the 581-589 region has a sequence that is at least 85% identical to SEQ ID NO: 18. 213. A viral protein (VP) capsid polypeptide, wherein the VP capsid polypeptide comprises a 581-589 region corresponding to residues 581 to 589 of a VP1 polypeptide; wherein the 581-589 region has a sequence that is at least 85% identical to SEQ ID NO: 3472. 214. A viral protein (VP) capsid polypeptide, wherein the VP capsid polypeptide comprises a 581-589 region corresponding to residues 581 to 589 of a VP1 polypeptide; wherein the 581-589 region has a sequence that is at least 85% identical to SEQ ID NO: 262. 215. A viral protein (VP) capsid polypeptide, wherein the VP capsid polypeptide comprises a 581-589 region corresponding to residues 581 to 589 of a VP1 polypeptide; wherein the 581-589 region has a sequence that is at least 85% identical to SEQ ID NO: 3306. 216. A viral protein (VP) capsid polypeptide, wherein the VP capsid polypeptide comprises a 581-589 region corresponding to residues 581 to 589 of a VP1 polypeptide; wherein the 581-589 region has a sequence that is at least 85% identical to SEQ ID NO: 2028. 217. A viral protein (VP) capsid polypeptide, wherein the VP capsid polypeptide comprises a 581-589 region corresponding to residues 581 to 589 of a VP1 polypeptide; wherein the 581-589 region has a sequence that is at least 85% identical to SEQ ID NO: 2791. 218. A viral protein (VP) capsid polypeptide, wherein the VP capsid polypeptide comprises a 581-589 region corresponding to residues 581 to 589 of a VP1 polypeptide; wherein the 581-589 region has a sequence that is at least 85% identical to SEQ ID NO: 424. 219. A viral protein (VP) capsid polypeptide, wherein the VP capsid polypeptide comprises a 581-589 region corresponding to residues 581 to 589 of a VP1 polypeptide; wherein the 581-589 region has a sequence that is at least 85% identical to SEQ ID NO: 2536. 220. A viral protein (VP) capsid polypeptide, wherein the VP capsid polypeptide comprises a 581-589 region corresponding to residues 581 to 589 of a VP1 polypeptide; wherein the 581-589 region has a sequence that is at least 85% identical to SEQ ID NO: 1971. 221. A viral protein (VP) capsid polypeptide, wherein the VP capsid polypeptide comprises a 581-589 region corresponding to residues 581 to 589 of a VP1 polypeptide; wherein the 581-589 region has a sequence that is at least 85% identical to SEQ ID NO: 415. 222. A viral protein (VP) capsid polypeptide, wherein the VP capsid polypeptide comprises a 581-589 region corresponding to residues 581 to 589 of a VP1 polypeptide; wherein the 581-589 region has a sequence that is at least 85% identical to SEQ ID NO: 3846. 223. A viral protein (VP) capsid polypeptide, wherein the VP capsid polypeptide comprises a 581-589 region corresponding to residues 581 to 589 of a VP1 polypeptide; wherein the 581-589 region has a sequence that is at least 85% identical to SEQ ID NO: 3283. 224. A viral protein (VP) capsid polypeptide, wherein the VP capsid polypeptide comprises a 581-589 region corresponding to residues 581 to 589 of a VP1 polypeptide; wherein the 581-589 region has a sequence that is at least 85% identical to SEQ ID NO: 1956. 225. A viral protein (VP) capsid polypeptide, wherein the VP capsid polypeptide comprises a 581-589 region corresponding to residues 581 to 589 of a VP1 polypeptide; wherein the 581-589 region has a sequence that is at least 85% identical to SEQ ID NO: 3297. 226. A viral protein (VP) capsid polypeptide, wherein the VP capsid polypeptide comprises a 581-589 region corresponding to residues 581 to 589 of a VP1 polypeptide; wherein the 581-589 region has a sequence that is at least 85% identical to SEQ ID NO: 4545. 227. A viral protein (VP) capsid polypeptide, wherein the VP capsid polypeptide comprises a 581-589 region corresponding to residues 581 to 589 of a VP1 polypeptide; wherein the 581-589 region has a sequence that is at least 85% identical to SEQ ID NO: 2661. 228. A viral protein (VP) capsid polypeptide, wherein the VP capsid polypeptide comprises a 581-589 region corresponding to residues 581 to 589 of a VP1 polypeptide; wherein the 581-589 region has a sequence that is at least 85% identical to SEQ ID NO: 1576. 229. A viral protein (VP) capsid polypeptide, wherein the VP capsid polypeptide comprises a 581-589 region corresponding to residues 581 to 589 of a VP1 polypeptide; wherein the 581-589 region has a sequence that is at least 85% identical to SEQ ID NO: 425. 230. A viral protein (VP) capsid polypeptide, wherein the VP capsid polypeptide comprises a 581-589 region corresponding to residues 581 to 589 of a VP1 polypeptide; wherein the 581-589 region has a sequence that is at least 85% identical to SEQ ID NO: 709. 231. A viral protein (VP) capsid polypeptide, wherein the VP capsid polypeptide comprises a 581-589 region corresponding to residues 581 to 589 of a VP1 polypeptide; wherein the 581-589 region has a sequence that is at least 85% identical to SEQ ID NO: 2168. 232. A viral protein (VP) capsid polypeptide, wherein the VP capsid polypeptide comprises a 581-589 region corresponding to residues 581 to 589 of a VP1 polypeptide; wherein the 581-589 region has a sequence that is at least 85% identical to SEQ ID NO: 54. 233. A viral protein (VP) capsid polypeptide, wherein the VP capsid polypeptide comprises a 581-589 region corresponding to residues 581 to 589 of a VP1 polypeptide; wherein the 581-589 region has a sequence that is at least 85% identical to SEQ ID NO: 429. 234. A viral protein (VP) capsid polypeptide, wherein the VP capsid polypeptide comprises a 581-589 region corresponding to residues 581 to 589 of a VP1 polypeptide; wherein the 581-589 region has a sequence that is at least 85% identical to SEQ ID NO: 708. 235. A viral protein (VP) capsid polypeptide, wherein the VP capsid polypeptide comprises a 581-589 region corresponding to residues 581 to 589 of a VP1 polypeptide; wherein the 581-589 region has a sequence that is at least 85% identical to SEQ ID NO: 428. 236. A viral protein (VP) capsid polypeptide, wherein the VP capsid polypeptide comprises a 581-589 region corresponding to residues 581 to 589 of a VP1 polypeptide; wherein the 581-589 region has a sequence that is at least 85% identical to SEQ ID NO: 4119. 237. A viral protein (VP) capsid polypeptide, wherein the VP capsid polypeptide comprises a 581-589 region corresponding to residues 581 to 589 of a VP1 polypeptide; wherein the 581-589 region has a sequence that is at least 85% identical to SEQ ID NO: 3906. 238. A viral protein (VP) capsid polypeptide, wherein the VP capsid polypeptide comprises a 581-589 region corresponding to residues 581 to 589 of a VP1 polypeptide; wherein the 581-589 region has a sequence that is at least 85% identical to SEQ ID NO: 2456. 239. A viral protein (VP) capsid polypeptide, wherein the VP capsid polypeptide comprises a 581-589 region corresponding to residues 581 to 589 of a VP1 polypeptide; wherein the 581-589 region has a sequence that is at least 85% identical to SEQ ID NO: 2278. 240. A viral protein (VP) capsid polypeptide, wherein the VP capsid polypeptide comprises a 581-589 region corresponding to residues 581 to 589 of a VP1 polypeptide; wherein the 581-589 region has a sequence that is at least 85% identical to SEQ ID NO: 5006. 241. A viral protein (VP) capsid polypeptide, wherein the VP capsid polypeptide comprises a 581-589 region corresponding to residues 581 to 589 of a VP1 polypeptide; wherein the 581-589 region has a sequence that is at least 85% identical to SEQ ID NO: 426. 242. A viral protein (VP) capsid polypeptide, wherein the VP capsid polypeptide comprises a 581-589 region corresponding to residues 581 to 589 of a VP1 polypeptide; wherein the 581-589 region has a sequence that is at least 85% identical to SEQ ID NO: 307. 243. A viral protein (VP) capsid polypeptide, wherein the VP capsid polypeptide comprises a 581-589 region corresponding to residues 581 to 589 of a VP1 polypeptide; wherein the 581-589 region has a sequence that is at least 85% identical to SEQ ID NO: 5155. 244. A viral protein (VP) capsid polypeptide, wherein the VP capsid polypeptide comprises a 581-589 region corresponding to residues 581 to 589 of a VP1 polypeptide; wherein the 581-589 region has a sequence that is at least 85% identical to SEQ ID NO: 2640. 245. A viral protein (VP) capsid polypeptide, wherein the VP capsid polypeptide comprises a 581-589 region corresponding to residues 581 to 589 of a VP1 polypeptide; wherein the 581-589 region has a sequence that is at least 85% identical to SEQ ID NO: 4317. 246. A viral protein (VP) capsid polypeptide, wherein the VP capsid polypeptide comprises a 581-589 region corresponding to residues 581 to 589 of a VP1 polypeptide; wherein the 581-589 region has a sequence that is at least 85% identical to SEQ ID NO: 1145. 247. A viral protein (VP) capsid polypeptide, wherein the VP capsid polypeptide comprises a 581-589 region corresponding to residues 581 to 589 of a VP1 polypeptide; wherein the 581-589 region has a sequence that is at least 85% identical to SEQ ID NO: 430. 248. A viral protein (VP) capsid polypeptide, wherein the VP capsid polypeptide comprises a 581-589 region corresponding to residues 581 to 589 of a VP1 polypeptide; wherein the 581-589 region has a sequence that is at least 85% identical to SEQ ID NO: 885. 249. A viral protein (VP) capsid polypeptide, wherein the VP capsid polypeptide comprises a 581-589 region corresponding to residues 581 to 589 of a VP1 polypeptide; wherein the 581-589 region has a sequence that is at least 85% identical to SEQ ID NO: 23. 250. A viral protein (VP) capsid polypeptide, wherein the VP capsid polypeptide comprises a 581-589 region corresponding to residues 581 to 589 of a VP1 polypeptide; wherein the 581-589 region has a sequence that is at least 85% identical to SEQ ID NO: 103. 251. A viral protein (VP) capsid polypeptide, wherein the VP capsid polypeptide comprises a 581-589 region corresponding to residues 581 to 589 of a VP1 polypeptide; wherein the 581-589 region has a sequence that is at least 85% identical to SEQ ID NO: 22. 252. A viral protein (VP) capsid polypeptide, wherein the VP capsid polypeptide comprises a 581-589 region corresponding to residues 581 to 589 of a VP1 polypeptide; wherein the 581-589 region has a sequence that is at least 85% identical to SEQ ID NO: 4031. 253. A viral protein (VP) capsid polypeptide, wherein the VP capsid polypeptide comprises a 581-589 region corresponding to residues 581 to 589 of a VP1 polypeptide; wherein the 581-589 region has a sequence that is at least 85% identical to SEQ ID NO: 1008. 254. A viral protein (VP) capsid polypeptide, wherein the VP capsid polypeptide comprises a 581-589 region corresponding to residues 581 to 589 of a VP1 polypeptide; wherein the 581-589 region has a sequence that is at least 85% identical to SEQ ID NO: 4790. 255. A viral protein (VP) capsid polypeptide, wherein the VP capsid polypeptide comprises a 581-589 region corresponding to residues 581 to 589 of a VP1 polypeptide; wherein the 581-589 region has a sequence that is at least 85% identical to SEQ ID NO: 2522. 256. A viral protein (VP) capsid polypeptide, wherein the VP capsid polypeptide comprises a 581-589 region corresponding to residues 581 to 589 of a VP1 polypeptide; wherein the 581-589 region has a sequence that is at least 85% identical to SEQ ID NO: 1432. 257. A viral protein (VP) capsid polypeptide, wherein the VP capsid polypeptide comprises a 581-589 region corresponding to residues 581 to 589 of a VP1 polypeptide; wherein the 581-589 region has a sequence that is at least 85% identical to SEQ ID NO: 2914. 258. A viral protein (VP) capsid polypeptide, wherein the VP capsid polypeptide comprises a 581-589 region corresponding to residues 581 to 589 of a VP1 polypeptide; wherein the 581-589 region has a sequence that is at least 85% identical to SEQ ID NO: 3935. 259. A viral protein (VP) capsid polypeptide, wherein the VP capsid polypeptide comprises a 581-589 region corresponding to residues 581 to 589 of a VP1 polypeptide; wherein the 581-589 region has a sequence that is at least 85% identical to SEQ ID NO: 5042. 260. A viral protein (VP) capsid polypeptide, wherein the VP capsid polypeptide comprises a 581-589 region corresponding to residues 581 to 589 of a VP1 polypeptide; wherein the 581-589 region has a sequence that is at least 85% identical to SEQ ID NO: 2865. 261. A viral protein (VP) capsid polypeptide, wherein the VP capsid polypeptide comprises a 581-589 region corresponding to residues 581 to 589 of a VP1 polypeptide; wherein the 581-589 region has a sequence that is at least 85% identical to SEQ ID NO: 4264. 262. A viral protein (VP) capsid polypeptide, wherein the VP capsid polypeptide comprises a 581-589 region corresponding to residues 581 to 589 of a VP1 polypeptide; wherein the 581-589 region has a sequence that is at least 85% identical to SEQ ID NO: 964. 263. A viral protein (VP) capsid polypeptide, wherein the VP capsid polypeptide comprises a 581-589 region corresponding to residues 581 to 589 of a VP1 polypeptide; wherein the 581-589 region has a sequence that is at least 85% identical to SEQ ID NO: 1268. 264. A viral protein (VP) capsid polypeptide, wherein the VP capsid polypeptide comprises a 581-589 region corresponding to residues 581 to 589 of a VP1 polypeptide; wherein the 581-589 region has a sequence that is at least 85% identical to SEQ ID NO: 5065. 265. A viral protein (VP) capsid polypeptide, wherein the VP capsid polypeptide comprises a 581-589 region corresponding to residues 581 to 589 of a VP1 polypeptide; wherein the 581-589 region has a sequence that is at least 85% identical to SEQ ID NO: 706. 266. A viral protein (VP) capsid polypeptide, wherein the VP capsid polypeptide comprises a 581-589 region corresponding to residues 581 to 589 of a VP1 polypeptide; wherein the 581-589 region has a sequence that is at least 85% identical to SEQ ID NO: 4704. 267. A viral protein (VP) capsid polypeptide, wherein the VP capsid polypeptide comprises a 581-589 region corresponding to residues 581 to 589 of a VP1 polypeptide; wherein the 581-589 region has a sequence that is at least 85% identical to SEQ ID NO: 569. 268. A viral protein (VP) capsid polypeptide, wherein the VP capsid polypeptide comprises a 581-589 region corresponding to residues 581 to 589 of a VP1 polypeptide; wherein the 581-589 region has a sequence that is at least 85% identical to SEQ ID NO: 2994. 269. A viral protein (VP) capsid polypeptide, wherein the VP capsid polypeptide comprises a 581-589 region corresponding to residues 581 to 589 of a VP1 polypeptide; wherein the 581-589 region has a sequence that is at least 85% identical to SEQ ID NO: 829. 270. A viral protein (VP) capsid polypeptide, wherein the VP capsid polypeptide comprises a 581-589 region corresponding to residues 581 to 589 of a VP1 polypeptide; wherein the 581-589 region has a sequence that is at least 85% identical to SEQ ID NO: 1171. 271. A viral protein (VP) capsid polypeptide, wherein the VP capsid polypeptide comprises a 581-589 region corresponding to residues 581 to 589 of a VP1 polypeptide; wherein the 581-589 region has a sequence that is at least 85% identical to SEQ ID NO: 1041. 272. A viral protein (VP) capsid polypeptide, wherein the VP capsid polypeptide comprises a 581-589 region corresponding to residues 581 to 589 of a VP1 polypeptide; wherein the 581-589 region has a sequence that is at least 85% identical to SEQ ID NO: 5070. 273. A viral protein (VP) capsid polypeptide, wherein the VP capsid polypeptide comprises a 581-589 region corresponding to residues 581 to 589 of a VP1 polypeptide; wherein the 581-589 region has a sequence that is at least 85% identical to SEQ ID NO: 139. 274. A viral protein (VP) capsid polypeptide, wherein the VP capsid polypeptide comprises a 581-589 region corresponding to residues 581 to 589 of a VP1 polypeptide; wherein the 581-589 region has a sequence that is at least 85% identical to SEQ ID NO: 3304. 275. A viral protein (VP) capsid polypeptide, wherein the VP capsid polypeptide comprises a 581-589 region corresponding to residues 581 to 589 of a VP1 polypeptide; wherein the 581-589 region has a sequence that is at least 85% identical to SEQ ID NO: 2431. 276. A viral protein (VP) capsid polypeptide, wherein the VP capsid polypeptide comprises a 581-589 region corresponding to residues 581 to 589 of a VP1 polypeptide; wherein the 581-589 region has a sequence that is at least 85% identical to SEQ ID NO: 4288. 277. A viral protein (VP) capsid polypeptide, wherein the VP capsid polypeptide comprises a 581-589 region corresponding to residues 581 to 589 of a VP1 polypeptide; wherein the 581-589 region has a sequence that is at least 85% identical to SEQ ID NO: 5795. 278. A viral protein (VP) capsid polypeptide, wherein the VP capsid polypeptide comprises a 581-589 region corresponding to residues 581 to 589 of a VP1 polypeptide; wherein the 581-589 region has a sequence that is at least 85% identical to SEQ ID NO: 1300. 279. A viral protein (VP) capsid polypeptide, wherein the VP capsid polypeptide comprises a 581-589 region corresponding to residues 581 to 589 of a VP1 polypeptide; wherein the 581-589 region has a sequence that is at least 85% identical to SEQ ID NO: 724. 280. A viral protein (VP) capsid polypeptide, wherein the VP capsid polypeptide comprises a 581-589 region corresponding to residues 581 to 589 of a VP1 polypeptide; wherein the 581-589 region has a sequence that is at least 85% identical to SEQ ID NO: 1770. 281. A viral protein (VP) capsid polypeptide, wherein the VP capsid polypeptide comprises a 581-589 region corresponding to residues 581 to 589 of a VP1 polypeptide; wherein the 581-589 region has a sequence that is at least 85% identical to SEQ ID NO: 2830. 282. A viral protein (VP) capsid polypeptide, wherein the VP capsid polypeptide comprises a 581-589 region corresponding to residues 581 to 589 of a VP1 polypeptide; wherein the 581-589 region has a sequence that is at least 85% identical to SEQ ID NO: 1972. 283. A viral protein (VP) capsid polypeptide, wherein the VP capsid polypeptide comprises a 581-589 region corresponding to residues 581 to 589 of a VP1 polypeptide; wherein the 581-589 region has a sequence that is at least 85% identical to SEQ ID NO: 1649. 284. A viral protein (VP) capsid polypeptide, wherein the VP capsid polypeptide comprises a 581-589 region corresponding to residues 581 to 589 of a VP1 polypeptide; wherein the 581-589 region has a sequence that is at least 85% identical to SEQ ID NO: 2515. 285. A viral protein (VP) capsid polypeptide, wherein the VP capsid polypeptide comprises a 581-589 region corresponding to residues 581 to 589 of a VP1 polypeptide; wherein the 581-589 region has a sequence that is at least 85% identical to SEQ ID NO: 2849. 286. A viral protein (VP) capsid polypeptide, wherein the VP capsid polypeptide comprises a 581-589 region corresponding to residues 581 to 589 of a VP1 polypeptide; wherein the 581-589 region has a sequence that is at least 85% identical to SEQ ID NO: 3796. 287. A viral protein (VP) capsid polypeptide, wherein the VP capsid polypeptide comprises a 581-589 region corresponding to residues 581 to 589 of a VP1 polypeptide; wherein the 581-589 region has a sequence that is at least 85% identical to SEQ ID NO: 5815. 288. A viral protein (VP) capsid polypeptide, wherein the VP capsid polypeptide comprises a 581-589 region corresponding to residues 581 to 589 of a VP1 polypeptide; wherein the 581-589 region has a sequence that is at least 85% identical to SEQ ID NO: 118. 289. A viral protein (VP) capsid polypeptide, wherein the VP capsid polypeptide comprises a 581-589 region corresponding to residues 581 to 589 of a VP1 polypeptide; wherein the 581-589 region has a sequence that is at least 85% identical to SEQ ID NO: 4766. 290. A viral protein (VP) capsid polypeptide, wherein the VP capsid polypeptide comprises a 581-589 region corresponding to residues 581 to 589 of a VP1 polypeptide; wherein the 581-589 region has a sequence that is at least 85% identical to SEQ ID NO: 770. 291. A viral protein (VP) capsid polypeptide, wherein the VP capsid polypeptide comprises a 581-589 region corresponding to residues 581 to 589 of a VP1 polypeptide; wherein the 581-589 region has a sequence that is at least 85% identical to SEQ ID NO: 1069. 292. A viral protein (VP) capsid polypeptide, wherein the VP capsid polypeptide comprises a 581-589 region corresponding to residues 581 to 589 of a VP1 polypeptide; wherein the 581-589 region has a sequence that is at least 85% identical to SEQ ID NO: 3061. 293. A viral protein (VP) capsid polypeptide, wherein the VP capsid polypeptide comprises a 581-589 region corresponding to residues 581 to 589 of a VP1 polypeptide; wherein the 581-589 region has a sequence that is at least 85% identical to SEQ ID NO: 4290. 294. A viral protein (VP) capsid polypeptide, wherein the VP capsid polypeptide comprises a 581-589 region corresponding to residues 581 to 589 of a VP1 polypeptide; wherein the 581-589 region has a sequence that is at least 85% identical to SEQ ID NO: 4261. 295. A viral protein (VP) capsid polypeptide, wherein the VP capsid polypeptide comprises a 581-589 region corresponding to residues 581 to 589 of a VP1 polypeptide; wherein the 581-589 region has a sequence that is at least 85% identical to SEQ ID NO: 4239. 296. A viral protein (VP) capsid polypeptide, wherein the VP capsid polypeptide comprises a 581-589 region corresponding to residues 581 to 589 of a VP1 polypeptide; wherein the 581-589 region has a sequence that is at least 85% identical to SEQ ID NO: 3478. 297. A viral protein (VP) capsid polypeptide, wherein the VP capsid polypeptide comprises a 581-589 region corresponding to residues 581 to 589 of a VP1 polypeptide; wherein the 581-589 region has a sequence that is at least 85% identical to SEQ ID NO: 1887. 298. A viral protein (VP) capsid polypeptide, wherein the VP capsid polypeptide comprises a 581-589 region corresponding to residues 581 to 589 of a VP1 polypeptide; wherein the 581-589 region has a sequence that is at least 85% identical to SEQ ID NO: 2671. 299. A viral protein (VP) capsid polypeptide, wherein the VP capsid polypeptide comprises a 581-589 region corresponding to residues 581 to 589 of a VP1 polypeptide; wherein the 581-589 region has a sequence that is at least 85% identical to SEQ ID NO: 256. 300. A viral protein (VP) capsid polypeptide, wherein the VP capsid polypeptide comprises a 581-589 region corresponding to residues 581 to 589 of a VP1 polypeptide; wherein the 581-589 region has a sequence that is at least 85% identical to SEQ ID NO: 1256. 301. A viral protein (VP) capsid polypeptide, wherein the VP capsid polypeptide comprises a 581-589 region corresponding to residues 581 to 589 of a VP1 polypeptide; wherein the 581-589 region has a sequence that is at least 85% identical to SEQ ID NO: 719. 302. A viral protein (VP) capsid polypeptide, wherein the VP capsid polypeptide comprises a 581-589 region corresponding to residues 581 to 589 of a VP1 polypeptide; wherein the 581-589 region has a sequence that is at least 85% identical to SEQ ID NO: 1448. 303. A viral protein (VP) capsid polypeptide, wherein the VP capsid polypeptide comprises a 581-589 region corresponding to residues 581 to 589 of a VP1 polypeptide; wherein the 581-589 region has a sequence that is at least 85% identical to SEQ ID NO: 280. 304. A viral protein (VP) capsid polypeptide, wherein the VP capsid polypeptide comprises a 581-589 region corresponding to residues 581 to 589 of a VP1 polypeptide; wherein the 581-589 region has a sequence that is at least 85% identical to SEQ ID NO: 4338. 305. A viral protein (VP) capsid polypeptide, wherein the VP capsid polypeptide comprises a 581-589 region corresponding to residues 581 to 589 of a VP1 polypeptide; wherein the 581-589 region has a sequence that is at least 85% identical to SEQ ID NO: 5037. 306. A viral protein (VP) capsid polypeptide, wherein the VP capsid polypeptide comprises a 581-589 region corresponding to residues 581 to 589 of a VP1 polypeptide; wherein the 581-589 region has a sequence that is at least 85% identical to SEQ ID NO: 1901. 307. A viral protein (VP) capsid polypeptide, wherein the VP capsid polypeptide comprises a 581-589 region corresponding to residues 581 to 589 of a VP1 polypeptide; wherein the 581-589 region has a sequence that is at least 85% identical to SEQ ID NO: 438. 308. A viral protein (VP) capsid polypeptide, wherein the VP capsid polypeptide comprises a 581-589 region corresponding to residues 581 to 589 of a VP1 polypeptide; wherein the 581-589 region has a sequence that is at least 85% identical to SEQ ID NO: 2834. 309. A viral protein (VP) capsid polypeptide, wherein the VP capsid polypeptide comprises a 581-589 region corresponding to residues 581 to 589 of a VP1 polypeptide; wherein the 581-589 region has a sequence that is at least 85% identical to SEQ ID NO: 5491. 310. A viral protein (VP) capsid polypeptide, wherein the VP capsid polypeptide comprises a 581-589 region corresponding to residues 581 to 589 of a VP1 polypeptide; wherein the 581-589 region has a sequence that is at least 85% identical to SEQ ID NO: 4591. 311. A viral protein (VP) capsid polypeptide, wherein the VP capsid polypeptide comprises a 581-589 region corresponding to residues 581 to 589 of a VP1 polypeptide; wherein the 581-589 region has a sequence that is at least 85% identical to SEQ ID NO: 4936. 312. A viral protein (VP) capsid polypeptide, wherein the VP capsid polypeptide comprises a 581-589 region corresponding to residues 581 to 589 of a VP1 polypeptide; wherein the 581-589 region has a sequence that is at least 85% identical to SEQ ID NO: 348. 313. A viral protein (VP) capsid polypeptide, wherein the VP capsid polypeptide comprises a 581-589 region corresponding to residues 581 to 589 of a VP1 polypeptide; wherein the 581-589 region has a sequence that is at least 85% identical to SEQ ID NO: 5607. 314. A viral protein (VP) capsid polypeptide, wherein the VP capsid polypeptide comprises a 581-589 region corresponding to residues 581 to 589 of a VP1 polypeptide; wherein the 581-589 region has a sequence that is at least 85% identical to SEQ ID NO: 4955. 315. A viral protein (VP) capsid polypeptide, wherein the VP capsid polypeptide comprises a 581-589 region corresponding to residues 581 to 589 of a VP1 polypeptide; wherein the 581-589 region has a sequence that is at least 85% identical to SEQ ID NO: 5017. 316. A viral protein (VP) capsid polypeptide, wherein the VP capsid polypeptide comprises a 581-589 region corresponding to residues 581 to 589 of a VP1 polypeptide; wherein the 581-589 region has a sequence that is at least 85% identical to SEQ ID NO: 4349. 317. A viral protein (VP) capsid polypeptide, wherein the VP capsid polypeptide comprises a 581-589 region corresponding to residues 581 to 589 of a VP1 polypeptide; wherein the 581-589 region has a sequence that is at least 85% identical to SEQ ID NO: 4964. 318. A viral protein (VP) capsid polypeptide, wherein the VP capsid polypeptide comprises a 581-589 region corresponding to residues 581 to 589 of a VP1 polypeptide; wherein the 581-589 region has a sequence that is at least 85% identical to SEQ ID NO: 293. 319. A viral protein (VP) capsid polypeptide, wherein the VP capsid polypeptide comprises a 581-589 region corresponding to residues 581 to 589 of a VP1 polypeptide; wherein the 581-589 region has a sequence that is at least 85% identical to SEQ ID NO: 4314. 320. A viral protein (VP) capsid polypeptide, wherein the VP capsid polypeptide comprises a 581-589 region corresponding to residues 581 to 589 of a VP1 polypeptide; wherein the 581-589 region has a sequence that is at least 85% identical to SEQ ID NO: 4995. 321. A viral protein (VP) capsid polypeptide, wherein the VP capsid polypeptide comprises a 581-589 region corresponding to residues 581 to 589 of a VP1 polypeptide; wherein the 581-589 region has a sequence that is at least 85% identical to SEQ ID NO: 4366. 322. A viral protein (VP) capsid polypeptide, wherein the VP capsid polypeptide comprises a 581-589 region corresponding to residues 581 to 589 of a VP1 polypeptide; wherein the 581-589 region has a sequence that is at least 85% identical to SEQ ID NO: 4961. 323. A viral protein (VP) capsid polypeptide, wherein the VP capsid polypeptide comprises a 581-589 region corresponding to residues 581 to 589 of a VP1 polypeptide; wherein the 581-589 region has a sequence that is at least 85% identical to SEQ ID NO: 4952. 324. A viral protein (VP) capsid polypeptide, wherein the VP capsid polypeptide comprises a 581-589 region corresponding to residues 581 to 589 of a VP1 polypeptide; wherein the 581-589 region has a sequence that is at least 85% identical to SEQ ID NO: 5075. 325. A viral protein (VP) capsid polypeptide, wherein the VP capsid polypeptide comprises a 581-589 region corresponding to residues 581 to 589 of a VP1 polypeptide; wherein the 581-589 region has a sequence that is at least 85% identical to SEQ ID NO: 4354. 326. A viral protein (VP) capsid polypeptide, wherein the VP capsid polypeptide comprises a 581-589 region corresponding to residues 581 to 589 of a VP1 polypeptide; wherein the 581-589 region has a sequence that is at least 85% identical to SEQ ID NO: 5060. 327. A viral protein (VP) capsid polypeptide, wherein the VP capsid polypeptide comprises a 581-589 region corresponding to residues 581 to 589 of a VP1 polypeptide; wherein the 581-589 region has a sequence that is at least 85% identical to SEQ ID NO: 5138. 328. A viral protein (VP) capsid polypeptide, wherein the VP capsid polypeptide comprises a 581-589 region corresponding to residues 581 to 589 of a VP1 polypeptide; wherein the 581-589 region has a sequence that is at least 85% identical to SEQ ID NO: 5206. 329. A viral protein (VP) capsid polypeptide, wherein the VP capsid polypeptide comprises a 581-589 region corresponding to residues 581 to 589 of a VP1 polypeptide; wherein the 581-589 region has a sequence that is at least 85% identical to SEQ ID NO: 5283. 330. A viral protein (VP) capsid polypeptide, wherein the VP capsid polypeptide comprises a 581-589 region corresponding to residues 581 to 589 of a VP1 polypeptide; wherein the 581-589 region has a sequence that is at least 85% identical to SEQ ID NO: 5092. 331. A viral protein (VP) capsid polypeptide, wherein the VP capsid polypeptide comprises a 581-589 region corresponding to residues 581 to 589 of a VP1 polypeptide; wherein the 581-589 region has a sequence that is at least 85% identical to SEQ ID NO: 4059. 332. A viral protein (VP) capsid polypeptide, wherein the VP capsid polypeptide comprises a 581-589 region corresponding to residues 581 to 589 of a VP1 polypeptide; wherein the 581-589 region has a sequence that is at least 85% identical to SEQ ID NO: 4295. 333. A viral protein (VP) capsid polypeptide, wherein the VP capsid polypeptide comprises a 581-589 region corresponding to residues 581 to 589 of a VP1 polypeptide; wherein the 581-589 region has a sequence that is at least 85% identical to SEQ ID NO: 5030. 334. A viral protein (VP) capsid polypeptide, wherein the VP capsid polypeptide comprises a 581-589 region corresponding to residues 581 to 589 of a VP1 polypeptide; wherein the 581-589 region has a sequence that is at least 85% identical to SEQ ID NO: 4938. 335. A viral protein (VP) capsid polypeptide, wherein the VP capsid polypeptide comprises a 581-589 region corresponding to residues 581 to 589 of a VP1 polypeptide; wherein the 581-589 region has a sequence that is at least 85% identical to SEQ ID NO: 5215. 336. A viral protein (VP) capsid polypeptide, wherein the VP capsid polypeptide comprises a 581-589 region corresponding to residues 581 to 589 of a VP1 polypeptide; wherein the 581-589 region has a sequence that is at least 85% identical to SEQ ID NO: 4960. 337. A viral protein (VP) capsid polypeptide, wherein the VP capsid polypeptide comprises a 581-589 region corresponding to residues 581 to 589 of a VP1 polypeptide; wherein the 581-589 region has a sequence that is at least 85% identical to SEQ ID NO: 4969. 338. A viral protein (VP) capsid polypeptide, wherein the VP capsid polypeptide comprises a 581-589 region corresponding to residues 581 to 589 of a VP1 polypeptide; wherein the 581-589 region has a sequence that is at least 85% identical to SEQ ID NO: 5023. 339. A viral protein (VP) capsid polypeptide, wherein the VP capsid polypeptide comprises a 581-589 region corresponding to residues 581 to 589 of a VP1 polypeptide; wherein the 581-589 region has a sequence that is at least 85% identical to SEQ ID NO: 4934. 340. A viral protein (VP) capsid polypeptide, wherein the VP capsid polypeptide comprises a 581-589 region corresponding to residues 581 to 589 of a VP1 polypeptide; wherein the 581-589 region has a sequence that is at least 85% identical to SEQ ID NO: 4963. 341. A viral protein (VP) capsid polypeptide, wherein the VP capsid polypeptide comprises a 581-589 region corresponding to residues 581 to 589 of a VP1 polypeptide; wherein the 581-589 region has a sequence that is at least 85% identical to SEQ ID NO: 4363. 342. A viral protein (VP) capsid polypeptide, wherein the VP capsid polypeptide comprises a 581-589 region corresponding to residues 581 to 589 of a VP1 polypeptide; wherein the 581-589 region has a sequence that is at least 85% identical to SEQ ID NO: 5159. 343. A viral protein (VP) capsid polypeptide, wherein the VP capsid polypeptide comprises a 581-589 region corresponding to residues 581 to 589 of a VP1 polypeptide; wherein the 581-589 region has a sequence that is at least 85% identical to SEQ ID NO: 4973. 344. A viral protein (VP) capsid polypeptide, wherein the VP capsid polypeptide comprises a 581-589 region corresponding to residues 581 to 589 of a VP1 polypeptide; wherein the 581-589 region has a sequence that is at least 85% identical to SEQ ID NO: 5157. 345. A viral protein (VP) capsid polypeptide, wherein the VP capsid polypeptide comprises a 581-589 region corresponding to residues 581 to 589 of a VP1 polypeptide; wherein the 581-589 region has a sequence that is at least 85% identical to SEQ ID NO: 4972. 346. A viral protein (VP) capsid polypeptide, wherein the VP capsid polypeptide comprises a 581-589 region corresponding to residues 581 to 589 of a VP1 polypeptide; wherein the 581-589 region has a sequence that is at least 85% identical to SEQ ID NO: 4345. 347. A viral protein (VP) capsid polypeptide, wherein the VP capsid polypeptide comprises a 581-589 region corresponding to residues 581 to 589 of a VP1 polypeptide; wherein the 581-589 region has a sequence that is at least 85% identical to SEQ ID NO: 5039. 348. A viral protein (VP) capsid polypeptide, wherein the VP capsid polypeptide comprises a 581-589 region corresponding to residues 581 to 589 of a VP1 polypeptide; wherein the 581-589 region has a sequence that is at least 85% identical to SEQ ID NO: 5163. 349. A viral protein (VP) capsid polypeptide, wherein the VP capsid polypeptide comprises a 581-589 region corresponding to residues 581 to 589 of a VP1 polypeptide; wherein the 581-589 region has a sequence that is at least 85% identical to SEQ ID NO: 5040. 350. A viral protein (VP) capsid polypeptide, wherein the VP capsid polypeptide comprises a 581-589 region corresponding to residues 581 to 589 of a VP1 polypeptide; wherein the 581-589 region has a sequence that is at least 85% identical to SEQ ID NO: 4304. 351. A viral protein (VP) capsid polypeptide, wherein the VP capsid polypeptide comprises a 581-589 region corresponding to residues 581 to 589 of a VP1 polypeptide; wherein the 581-589 region has a sequence that is at least 85% identical to SEQ ID NO: 5193. 352. A viral protein (VP) capsid polypeptide, wherein the VP capsid polypeptide comprises a 581-589 region corresponding to residues 581 to 589 of a VP1 polypeptide; wherein the 581-589 region has a sequence that is at least 85% identical to SEQ ID NO: 5077. 353. A viral protein (VP) capsid polypeptide, wherein the VP capsid polypeptide comprises a 581-589 region corresponding to residues 581 to 589 of a VP1 polypeptide; wherein the 581-589 region has a sequence that is at least 85% identical to SEQ ID NO: 5814. 354. A viral protein (VP) capsid polypeptide, wherein the VP capsid polypeptide comprises a 581-589 region corresponding to residues 581 to 589 of a VP1 polypeptide; wherein the 581-589 region has a sequence that is at least 85% identical to SEQ ID NO: 386. 355. A viral protein (VP) capsid polypeptide, wherein the VP capsid polypeptide comprises a 581-589 region corresponding to residues 581 to 589 of a VP1 polypeptide; wherein the 581-589 region has a sequence that is at least 85% identical to SEQ ID NO: 5081. 356. A viral protein (VP) capsid polypeptide, wherein the VP capsid polypeptide comprises a 581-589 region corresponding to residues 581 to 589 of a VP1 polypeptide; wherein the 581-589 region has a sequence that is at least 85% identical to SEQ ID NO: 308. 357. A viral protein (VP) capsid polypeptide, wherein the VP capsid polypeptide comprises a 581-589 region corresponding to residues 581 to 589 of a VP1 polypeptide; wherein the 581-589 region has a sequence that is at least 85% identical to SEQ ID NO: 278. 358. A viral protein (VP) capsid polypeptide, wherein the VP capsid polypeptide comprises a 581-589 region corresponding to residues 581 to 589 of a VP1 polypeptide; wherein the 581-589 region has a sequence that is at least 85% identical to SEQ ID NO: 5127. 359. A viral protein (VP) capsid polypeptide, wherein the VP capsid polypeptide comprises a 581-589 region corresponding to residues 581 to 589 of a VP1 polypeptide; wherein the 581-589 region has a sequence that is at least 85% identical to SEQ ID NO: 5029. 360. A viral protein (VP) capsid polypeptide, wherein the VP capsid polypeptide comprises a 581-589 region corresponding to residues 581 to 589 of a VP1 polypeptide; wherein the 581-589 region has a sequence that is at least 85% identical to SEQ ID NO: 5143. 361. A viral protein (VP) capsid polypeptide, wherein the VP capsid polypeptide comprises a 581-589 region corresponding to residues 581 to 589 of a VP1 polypeptide; wherein the 581-589 region has a sequence that is at least 85% identical to SEQ ID NO: 4983. 362. A viral protein (VP) capsid polypeptide, wherein the VP capsid polypeptide comprises a 581-589 region corresponding to residues 581 to 589 of a VP1 polypeptide; wherein the 581-589 region has a sequence that is at least 85% identical to SEQ ID NO: 4361. 363. A viral protein (VP) capsid polypeptide, wherein the VP capsid polypeptide comprises a 581-589 region corresponding to residues 581 to 589 of a VP1 polypeptide; wherein the 581-589 region has a sequence that is at least 85% identical to SEQ ID NO: 5080. 364. A viral protein (VP) capsid polypeptide, wherein the VP capsid polypeptide comprises a 581-589 region corresponding to residues 581 to 589 of a VP1 polypeptide; wherein the 581-589 region has a sequence that is at least 85% identical to SEQ ID NO: 4343. 365. A viral protein (VP) capsid polypeptide, wherein the VP capsid polypeptide comprises a 581-589 region corresponding to residues 581 to 589 of a VP1 polypeptide; wherein the 581-589 region has a sequence that is at least 85% identical to SEQ ID NO: 4986. 366. A viral protein (VP) capsid polypeptide, wherein the VP capsid polypeptide comprises a 581-589 region corresponding to residues 581 to 589 of a VP1 polypeptide; wherein the 581-589 region has a sequence that is at least 85% identical to SEQ ID NO: 4311. 367. A viral protein (VP) capsid polypeptide, wherein the VP capsid polypeptide comprises a 581-589 region corresponding to residues 581 to 589 of a VP1 polypeptide; wherein the 581-589 region has a sequence that is at least 85% identical to SEQ ID NO: 5102. 368. A viral protein (VP) capsid polypeptide, wherein the VP capsid polypeptide comprises a 581-589 region corresponding to residues 581 to 589 of a VP1 polypeptide; wherein the 581-589 region has a sequence that is at least 85% identical to SEQ ID NO: 5280. 369. A viral protein (VP) capsid polypeptide, wherein the VP capsid polypeptide comprises a 581-589 region corresponding to residues 581 to 589 of a VP1 polypeptide; wherein the 581-589 region has a sequence that is at least 85% identical to SEQ ID NO: 5185. 370. A viral protein (VP) capsid polypeptide, wherein the VP capsid polypeptide comprises a 581-589 region corresponding to residues 581 to 589 of a VP1 polypeptide; wherein the 581-589 region has a sequence that is at least 85% identical to SEQ ID NO: 4935. 371. A viral protein (VP) capsid polypeptide, wherein the VP capsid polypeptide comprises a 581-589 region corresponding to residues 581 to 589 of a VP1 polypeptide; wherein the 581-589 region has a sequence that is at least 85% identical to SEQ ID NO: 4379. 372. A viral protein (VP) capsid polypeptide, wherein the VP capsid polypeptide comprises a 581-589 region corresponding to residues 581 to 589 of a VP1 polypeptide; wherein the 581-589 region has a sequence that is at least 85% identical to SEQ ID NO: 5052. 373. A viral protein (VP) capsid polypeptide, wherein the VP capsid polypeptide comprises a 581-589 region corresponding to residues 581 to 589 of a VP1 polypeptide; wherein the 581-589 region has a sequence that is at least 85% identical to SEQ ID NO: 5027. 374. A viral protein (VP) capsid polypeptide, wherein the VP capsid polypeptide comprises a 581-589 region corresponding to residues 581 to 589 of a VP1 polypeptide; wherein the 581-589 region has a sequence that is at least 85% identical to SEQ ID NO: 5173. 375. A viral protein (VP) capsid polypeptide, wherein the VP capsid polypeptide comprises a 581-589 region corresponding to residues 581 to 589 of a VP1 polypeptide; wherein the 581-589 region has a sequence that is at least 85% identical to SEQ ID NO: 5055. 376. A viral protein (VP) capsid polypeptide, wherein the VP capsid polypeptide comprises a 581-589 region corresponding to residues 581 to 589 of a VP1 polypeptide; wherein the 581-589 region has a sequence that is at least 85% identical to SEQ ID NO: 5123. 377. A viral protein (VP) capsid polypeptide, wherein the VP capsid polypeptide comprises a 581-589 region corresponding to residues 581 to 589 of a VP1 polypeptide; wherein the 581-589 region has a sequence that is at least 85% identical to SEQ ID NO: 4335. 378. A viral protein (VP) capsid polypeptide, wherein the VP capsid polypeptide comprises a 581-589 region corresponding to residues 581 to 589 of a VP1 polypeptide; wherein the 581-589 region has a sequence that is at least 85% identical to SEQ ID NO: 5208. 379. A viral protein (VP) capsid polypeptide, wherein the VP capsid polypeptide comprises a 581-589 region corresponding to residues 581 to 589 of a VP1 polypeptide; wherein the 581-589 region has a sequence that is at least 85% identical to SEQ ID NO: 4633. 380. A viral protein (VP) capsid polypeptide, wherein the VP capsid polypeptide comprises a 581-589 region corresponding to residues 581 to 589 of a VP1 polypeptide; wherein the 581-589 region has a sequence that is at least 85% identical to SEQ ID NO: 4359. 381. A viral protein (VP) capsid polypeptide, wherein the VP capsid polypeptide comprises a 581-589 region corresponding to residues 581 to 589 of a VP1 polypeptide; wherein the 581-589 region has a sequence that is at least 85% identical to SEQ ID NO: 289. 382. A viral protein (VP) capsid polypeptide, wherein the VP capsid polypeptide comprises a 581-589 region corresponding to residues 581 to 589 of a VP1 polypeptide; wherein the 581-589 region has a sequence that is at least 85% identical to SEQ ID NO: 4353. 383. A viral protein (VP) capsid polypeptide, wherein the VP capsid polypeptide comprises a 581-589 region corresponding to residues 581 to 589 of a VP1 polypeptide; wherein the 581-589 region has a sequence that is at least 85% identical to SEQ ID NO: 4316. 384. A viral protein (VP) capsid polypeptide, wherein the VP capsid polypeptide comprises a 581-589 region corresponding to residues 581 to 589 of a VP1 polypeptide; wherein the 581-589 region has a sequence that is at least 85% identical to SEQ ID NO: 5210. 385. A viral protein (VP) capsid polypeptide, wherein the VP capsid polypeptide comprises a 581-589 region corresponding to residues 581 to 589 of a VP1 polypeptide; wherein the 581-589 region has a sequence that is at least 85% identical to SEQ ID NO: 4949. 386. A viral protein (VP) capsid polypeptide, wherein the VP capsid polypeptide comprises a 581-589 region corresponding to residues 581 to 589 of a VP1 polypeptide; wherein the 581-589 region has a sequence that is at least 85% identical to SEQ ID NO: 4947. 387. A viral protein (VP) capsid polypeptide, wherein the VP capsid polypeptide comprises a 581-589 region corresponding to residues 581 to 589 of a VP1 polypeptide; wherein the 581-589 region has a sequence that is at least 85% identical to SEQ ID NO: 2838. 388. A viral protein (VP) capsid polypeptide, wherein the VP capsid polypeptide comprises a 581-589 region corresponding to residues 581 to 589 of a VP1 polypeptide; wherein the 581-589 region has a sequence that is at least 85% identical to SEQ ID NO: 378. 389. A viral protein (VP) capsid polypeptide, wherein the VP capsid polypeptide comprises a 581-589 region corresponding to residues 581 to 589 of a VP1 polypeptide; wherein the 581-589 region has a sequence that is at least 85% identical to SEQ ID NO: 5013. 390. A viral protein (VP) capsid polypeptide, wherein the VP capsid polypeptide comprises a 581-589 region corresponding to residues 581 to 589 of a VP1 polypeptide; wherein the 581-589 region has a sequence that is at least 85% identical to SEQ ID NO: 5278. 391. A viral protein (VP) capsid polypeptide, wherein the VP capsid polypeptide comprises a 581-589 region corresponding to residues 581 to 589 of a VP1 polypeptide; wherein the 581-589 region has a sequence that is at least 85% identical to SEQ ID NO: 1471. 392. A viral protein (VP) capsid polypeptide, wherein the VP capsid polypeptide comprises a 581-589 region corresponding to residues 581 to 589 of a VP1 polypeptide; wherein the 581-589 region has a sequence that is at least 85% identical to SEQ ID NO: 4346. 393. A viral protein (VP) capsid polypeptide, wherein the VP capsid polypeptide comprises a 581-589 region corresponding to residues 581 to 589 of a VP1 polypeptide; wherein the 581-589 region has a sequence that is at least 85% identical to SEQ ID NO: 297. 394. A viral protein (VP) capsid polypeptide, wherein the VP capsid polypeptide comprises a 581-589 region corresponding to residues 581 to 589 of a VP1 polypeptide; wherein the 581-589 region has a sequence that is at least 85% identical to SEQ ID NO: 4993. 395. A viral protein (VP) capsid polypeptide, wherein the VP capsid polypeptide comprises a 581-589 region corresponding to residues 581 to 589 of a VP1 polypeptide; wherein the 581-589 region has a sequence that is at least 85% identical to SEQ ID NO: 384. 396. A viral protein (VP) capsid polypeptide, wherein the VP capsid polypeptide comprises a 581-589 region corresponding to residues 581 to 589 of a VP1 polypeptide; wherein the 581-589 region has a sequence that is at least 85% identical to SEQ ID NO: 5062. 397. A viral protein (VP) capsid polypeptide, wherein the VP capsid polypeptide comprises a 581-589 region corresponding to residues 581 to 589 of a VP1 polypeptide; wherein the 581-589 region has a sequence that is at least 85% identical to SEQ ID NO: 4945. 398. A viral protein (VP) capsid polypeptide, wherein the VP capsid polypeptide comprises a 581-589 region corresponding to residues 581 to 589 of a VP1 polypeptide; wherein the 581-589 region has a sequence that is at least 85% identical to SEQ ID NO: 210. 399. A viral protein (VP) capsid polypeptide, wherein the VP capsid polypeptide comprises a 581-589 region corresponding to residues 581 to 589 of a VP1 polypeptide; wherein the 581-589 region has a sequence that is at least 85% identical to SEQ ID NO: 4009. 400. A viral protein (VP) capsid polypeptide, wherein the VP capsid polypeptide comprises a 581-589 region corresponding to residues 581 to 589 of a VP1 polypeptide; wherein the 581-589 region has a sequence that is at least 85% identical to SEQ ID NO: 5190. 401. A viral protein (VP) capsid polypeptide, wherein the VP capsid polypeptide comprises a 581-589 region corresponding to residues 581 to 589 of a VP1 polypeptide; wherein the 581-589 region has a sequence that is at least 85% identical to SEQ ID NO: 1561. 402. A viral protein (VP) capsid polypeptide, wherein the VP capsid polypeptide comprises a 581-589 region corresponding to residues 581 to 589 of a VP1 polypeptide; wherein the 581-589 region has a sequence that is at least 85% identical to SEQ ID NO: 5147. 403. A viral protein (VP) capsid polypeptide, wherein the VP capsid polypeptide comprises a 581-589 region corresponding to residues 581 to 589 of a VP1 polypeptide; wherein the 581-589 region has a sequence that is at least 85% identical to SEQ ID NO: 4238. 404. A viral protein (VP) capsid polypeptide, wherein the VP capsid polypeptide comprises a 581-589 region corresponding to residues 581 to 589 of a VP1 polypeptide; wherein the 581-589 region has a sequence that is at least 85% identical to SEQ ID NO: 5527. 405. A viral protein (VP) capsid polypeptide, wherein the VP capsid polypeptide comprises a 581-589 region corresponding to residues 581 to 589 of a VP1 polypeptide; wherein the 581-589 region has a sequence that is at least 85% identical to SEQ ID NO: 4355. 406. A viral protein (VP) capsid polypeptide, wherein the VP capsid polypeptide comprises a 581-589 region corresponding to residues 581 to 589 of a VP1 polypeptide; wherein the 581-589 region has a sequence that is at least 85% identical to SEQ ID NO: 5125. 407. A viral protein (VP) capsid polypeptide, wherein the VP capsid polypeptide comprises a 581-589 region corresponding to residues 581 to 589 of a VP1 polypeptide; wherein the 581-589 region has a sequence that is at least 85% identical to SEQ ID NO: 4108. 408. A viral protein (VP) capsid polypeptide, wherein the VP capsid polypeptide comprises a 581-589 region corresponding to residues 581 to 589 of a VP1 polypeptide; wherein the 581-589 region has a sequence that is at least 85% identical to SEQ ID NO: 2948. 409. A viral protein (VP) capsid polypeptide, wherein the VP capsid polypeptide comprises a 581-589 region corresponding to residues 581 to 589 of a VP1 polypeptide; wherein the 581-589 region has a sequence that is at least 85% identical to SEQ ID NO: 3821. 410. A viral protein (VP) capsid polypeptide, wherein the VP capsid polypeptide comprises a 581-589 region corresponding to residues 581 to 589 of a VP1 polypeptide; wherein the 581-589 region has a sequence that is at least 85% identical to SEQ ID NO: 4632. 411. A viral protein (VP) capsid polypeptide, wherein the VP capsid polypeptide comprises a 581-589 region corresponding to residues 581 to 589 of a VP1 polypeptide; wherein the 581-589 region has a sequence that is at least 85% identical to SEQ ID NO: 294. 412. A viral protein (VP) capsid polypeptide, wherein the VP capsid polypeptide comprises a 581-589 region corresponding to residues 581 to 589 of a VP1 polypeptide; wherein the 581-589 region has a sequence that is at least 85% identical to SEQ ID NO: 4943. 413. A viral protein (VP) capsid polypeptide, wherein the VP capsid polypeptide comprises a 581-589 region corresponding to residues 581 to 589 of a VP1 polypeptide; wherein the 581-589 region has a sequence that is at least 85% identical to SEQ ID NO: 1391. 414. A viral protein (VP) capsid polypeptide, wherein the VP capsid polypeptide comprises a 581-589 region corresponding to residues 581 to 589 of a VP1 polypeptide; wherein the 581-589 region has a sequence that is at least 85% identical to SEQ ID NO: 5078. 415. A viral protein (VP) capsid polypeptide, wherein the VP capsid polypeptide comprises a 581-589 region corresponding to residues 581 to 589 of a VP1 polypeptide; wherein the 581-589 region has a sequence that is at least 85% identical to SEQ ID NO: 3299. 416. A viral protein (VP) capsid polypeptide, wherein the VP capsid polypeptide comprises a 581-589 region corresponding to residues 581 to 589 of a VP1 polypeptide; wherein the 581-589 region has a sequence that is at least 85% identical to SEQ ID NO: 2897. 417. A viral protein (VP) capsid polypeptide, wherein the VP capsid polypeptide comprises a 581-589 region corresponding to residues 581 to 589 of a VP1 polypeptide; wherein the 581-589 region has a sequence that is at least 85% identical to SEQ ID NO: 1537. 418. A viral protein (VP) capsid polypeptide, wherein the VP capsid polypeptide comprises a 581-589 region corresponding to residues 581 to 589 of a VP1 polypeptide; wherein the 581-589 region has a sequence that is at least 85% identical to SEQ ID NO: 5255. 419. A viral protein (VP) capsid polypeptide, wherein the VP capsid polypeptide comprises a 581-589 region corresponding to residues 581 to 589 of a VP1 polypeptide; wherein the 581-589 region has a sequence that is at least 85% identical to SEQ ID NO: 141. 420. A viral protein (VP) capsid polypeptide, wherein the VP capsid polypeptide comprises a 581-589 region corresponding to residues 581 to 589 of a VP1 polypeptide; wherein the 581-589 region has a sequence that is at least 85% identical to SEQ ID NO: 5038. 421. A viral protein (VP) capsid polypeptide, wherein the VP capsid polypeptide comprises a 581-589 region corresponding to residues 581 to 589 of a VP1 polypeptide; wherein the 581-589 region has a sequence that is at least 85% identical to SEQ ID NO: 5153. 422. A viral protein (VP) capsid polypeptide, wherein the VP capsid polypeptide comprises a 581-589 region corresponding to residues 581 to 589 of a VP1 polypeptide; wherein the 581-589 region has a sequence that is at least 85% identical to SEQ ID NO: 1181. 423. A viral protein (VP) capsid polypeptide, wherein the VP capsid polypeptide comprises a 581-589 region corresponding to residues 581 to 589 of a VP1 polypeptide; wherein the 581-589 region has a sequence that is at least 85% identical to SEQ ID NO: 1204. 424. A viral protein (VP) capsid polypeptide, wherein the VP capsid polypeptide comprises a 581-589 region corresponding to residues 581 to 589 of a VP1 polypeptide; wherein the 581-589 region has a sequence that is at least 85% identical to SEQ ID NO: 4404. 425. A viral protein (VP) capsid polypeptide, wherein the VP capsid polypeptide comprises a 581-589 region corresponding to residues 581 to 589 of a VP1 polypeptide; wherein the 581-589 region has a sequence that is at least 85% identical to SEQ ID NO: 5106. 426. A viral protein (VP) capsid polypeptide, wherein the VP capsid polypeptide comprises a 581-589 region corresponding to residues 581 to 589 of a VP1 polypeptide; wherein the 581-589 region has a sequence that is at least 85% identical to SEQ ID NO: 2779. 427. A viral protein (VP) capsid polypeptide, wherein the VP capsid polypeptide comprises a 581-589 region corresponding to residues 581 to 589 of a VP1 polypeptide; wherein the 581-589 region has a sequence that is at least 85% identical to SEQ ID NO: 1824. 428. A viral protein (VP) capsid polypeptide, wherein the VP capsid polypeptide comprises a 581-589 region corresponding to residues 581 to 589 of a VP1 polypeptide; wherein the 581-589 region has a sequence that is at least 85% identical to SEQ ID NO: 5116. 429. A viral protein (VP) capsid polypeptide, wherein the VP capsid polypeptide comprises a 581-589 region corresponding to residues 581 to 589 of a VP1 polypeptide; wherein the 581-589 region has a sequence that is at least 85% identical to SEQ ID NO: 3179. 430. A viral protein (VP) capsid polypeptide, wherein the VP capsid polypeptide comprises a 581-589 region corresponding to residues 581 to 589 of a VP1 polypeptide; wherein the 581-589 region has a sequence that is at least 85% identical to SEQ ID NO: 98. 431. A viral protein (VP) capsid polypeptide, wherein the VP capsid polypeptide comprises a 581-589 region corresponding to residues 581 to 589 of a VP1 polypeptide; wherein the 581-589 region has a sequence that is at least 85% identical to SEQ ID NO: 1872. 432. A viral protein (VP) capsid polypeptide, wherein the VP capsid polypeptide comprises a 581-589 region corresponding to residues 581 to 589 of a VP1 polypeptide; wherein the 581-589 region has a sequence that is at least 85% identical to SEQ ID NO: 1634. 433. A viral protein (VP) capsid polypeptide, wherein the VP capsid polypeptide comprises a 581-589 region corresponding to residues 581 to 589 of a VP1 polypeptide; wherein the 581-589 region has a sequence that is at least 85% identical to SEQ ID NO: 1060. 434. A viral protein (VP) capsid polypeptide, wherein the VP capsid polypeptide comprises a 581-589 region corresponding to residues 581 to 589 of a VP1 polypeptide; wherein the 581-589 region has a sequence that is at least 85% identical to SEQ ID NO: 4941. 435. A viral protein (VP) capsid polypeptide, wherein the VP capsid polypeptide comprises a 581-589 region corresponding to residues 581 to 589 of a VP1 polypeptide; wherein the 581-589 region has a sequence that is at least 85% identical to SEQ ID NO: 4981. 436. A viral protein (VP) capsid polypeptide, wherein the VP capsid polypeptide comprises a 581-589 region corresponding to residues 581 to 589 of a VP1 polypeptide; wherein the 581-589 region has a sequence that is at least 85% identical to SEQ ID NO: 5274. 437. A viral protein (VP) capsid polypeptide, wherein the VP capsid polypeptide comprises a 581-589 region corresponding to residues 581 to 589 of a VP1 polypeptide; wherein the 581-589 region has a sequence that is at least 85% identical to SEQ ID NO: 5816 (QKMPNNMYG). 438. A viral protein (VP) capsid polypeptide, wherein the VP capsid polypeptide comprises a 581-589 region corresponding to residues 581 to 589 of a VP1 polypeptide; wherein the 581-589 region has a sequence that is at least 85% identical to SEQ ID NO: 2842. 439. A viral protein (VP) capsid polypeptide, wherein the VP capsid polypeptide comprises a 581-589 region corresponding to residues 581 to 589 of a VP1 polypeptide; wherein the 581-589 region has a sequence that is at least 85% identical to SEQ ID NO: 1934. 440. A viral protein (VP) capsid polypeptide, wherein the VP capsid polypeptide comprises a 581-589 region corresponding to residues 581 to 589 of a VP1 polypeptide; wherein the 581-589 region has a sequence that is at least 85% identical to SEQ ID NO: 5817. 441. A viral protein (VP) capsid polypeptide, wherein the VP capsid polypeptide comprises a 581-589 region corresponding to residues 581 to 589 of a VP1 polypeptide; wherein the 581-589 region has a sequence that is at least 85% identical to SEQ ID NO: 3998. 442. A viral protein (VP) capsid polypeptide, wherein the VP capsid polypeptide comprises a 581-589 region corresponding to residues 581 to 589 of a VP1 polypeptide; wherein the 581-589 region has a sequence that is at least 85% identical to SEQ ID NO: 5026. 443. A viral protein (VP) capsid polypeptide, wherein the VP capsid polypeptide comprises a 581-589 region corresponding to residues 581 to 589 of a VP1 polypeptide; wherein the 581-589 region has a sequence of SEQ ID NO: 18. 444. A viral protein (VP) capsid polypeptide, wherein the VP capsid polypeptide comprises a 581-589 region corresponding to residues 581 to 589 of a VP1 polypeptide; wherein the 581-589 region has a sequence of SEQ ID NO: 3472. 445. A viral protein (VP) capsid polypeptide, wherein the VP capsid polypeptide comprises a 581-589 region corresponding to residues 581 to 589 of a VP1 polypeptide; wherein the 581-589 region has a sequence of SEQ ID NO: 262. 446. A viral protein (VP) capsid polypeptide, wherein the VP capsid polypeptide comprises a 581-589 region corresponding to residues 581 to 589 of a VP1 polypeptide; wherein the 581-589 region has a sequence of SEQ ID NO: 3306. 447. A viral protein (VP) capsid polypeptide, wherein the VP capsid polypeptide comprises a 581-589 region corresponding to residues 581 to 589 of a VP1 polypeptide; wherein the 581-589 region has a sequence of SEQ ID NO: 2028. 448. A viral protein (VP) capsid polypeptide, wherein the VP capsid polypeptide comprises a 581-589 region corresponding to residues 581 to 589 of a VP1 polypeptide; wherein the 581-589 region has a sequence of SEQ ID NO: 2791. 449. A viral protein (VP) capsid polypeptide, wherein the VP capsid polypeptide comprises a 581-589 region corresponding to residues 581 to 589 of a VP1 polypeptide; wherein the 581-589 region has a sequence of SEQ ID NO: 424. 450. A viral protein (VP) capsid polypeptide, wherein the VP capsid polypeptide comprises a 581-589 region corresponding to residues 581 to 589 of a VP1 polypeptide; wherein the 581-589 region has a sequence of SEQ ID NO: 2536. 451. A viral protein (VP) capsid polypeptide, wherein the VP capsid polypeptide comprises a 581-589 region corresponding to residues 581 to 589 of a VP1 polypeptide; wherein the 581-589 region has a sequence of SEQ ID NO: 1971. 452. A viral protein (VP) capsid polypeptide, wherein the VP capsid polypeptide comprises a 581-589 region corresponding to residues 581 to 589 of a VP1 polypeptide; wherein the 581-589 region has a sequence of SEQ ID NO: 415. 453. A viral protein (VP) capsid polypeptide, wherein the VP capsid polypeptide comprises a 581-589 region corresponding to residues 581 to 589 of a VP1 polypeptide; wherein the 581-589 region has a sequence of SEQ ID NO: 3846. 454. A viral protein (VP) capsid polypeptide, wherein the VP capsid polypeptide comprises a 581-589 region corresponding to residues 581 to 589 of a VP1 polypeptide; wherein the 581-589 region has a sequence of SEQ ID NO: 3283. 455. A viral protein (VP) capsid polypeptide, wherein the VP capsid polypeptide comprises a 581-589 region corresponding to residues 581 to 589 of a VP1 polypeptide; wherein the 581-589 region has a sequence of SEQ ID NO: 1956. 456. A viral protein (VP) capsid polypeptide, wherein the VP capsid polypeptide comprises a 581-589 region corresponding to residues 581 to 589 of a VP1 polypeptide; wherein the 581-589 region has a sequence of SEQ ID NO: 3297. 457. A viral protein (VP) capsid polypeptide, wherein the VP capsid polypeptide comprises a 581-589 region corresponding to residues 581 to 589 of a VP1 polypeptide; wherein the 581-589 region has a sequence of SEQ ID NO: 4545. 458. A viral protein (VP) capsid polypeptide, wherein the VP capsid polypeptide comprises a 581-589 region corresponding to residues 581 to 589 of a VP1 polypeptide; wherein the 581-589 region has a sequence of SEQ ID NO: 2661. 459. A viral protein (VP) capsid polypeptide, wherein the VP capsid polypeptide comprises a 581-589 region corresponding to residues 581 to 589 of a VP1 polypeptide; wherein the 581-589 region has a sequence of SEQ ID NO: 1576. 460. A viral protein (VP) capsid polypeptide, wherein the VP capsid polypeptide comprises a 581-589 region corresponding to residues 581 to 589 of a VP1 polypeptide; wherein the 581-589 region has a sequence of SEQ ID NO: 425. 461. A viral protein (VP) capsid polypeptide, wherein the VP capsid polypeptide comprises a 581-589 region corresponding to residues 581 to 589 of a VP1 polypeptide; wherein the 581-589 region has a sequence of SEQ ID NO: 709. 462. A viral protein (VP) capsid polypeptide, wherein the VP capsid polypeptide comprises a 581-589 region corresponding to residues 581 to 589 of a VP1 polypeptide; wherein the 581-589 region has a sequence of SEQ ID NO: 2168. 463. A viral protein (VP) capsid polypeptide, wherein the VP capsid polypeptide comprises a 581-589 region corresponding to residues 581 to 589 of a VP1 polypeptide; wherein the 581-589 region has a sequence of SEQ ID NO: 54. 464. A viral protein (VP) capsid polypeptide, wherein the VP capsid polypeptide comprises a 581-589 region corresponding to residues 581 to 589 of a VP1 polypeptide; wherein the 581-589 region has a sequence of SEQ ID NO: 429. 465. A viral protein (VP) capsid polypeptide, wherein the VP capsid polypeptide comprises a 581-589 region corresponding to residues 581 to 589 of a VP1 polypeptide; wherein the 581-589 region has a sequence of SEQ ID NO: 708. 466. A viral protein (VP) capsid polypeptide, wherein the VP capsid polypeptide comprises a 581-589 region corresponding to residues 581 to 589 of a VP1 polypeptide; wherein the 581-589 region has a sequence of SEQ ID NO: 428. 467. A viral protein (VP) capsid polypeptide, wherein the VP capsid polypeptide comprises a 581-589 region corresponding to residues 581 to 589 of a VP1 polypeptide; wherein the 581-589 region has a sequence of SEQ ID NO: 4119. 468. A viral protein (VP) capsid polypeptide, wherein the VP capsid polypeptide comprises a 581-589 region corresponding to residues 581 to 589 of a VP1 polypeptide; wherein the 581-589 region has a sequence of SEQ ID NO: 3906. 469. A viral protein (VP) capsid polypeptide, wherein the VP capsid polypeptide comprises a 581-589 region corresponding to residues 581 to 589 of a VP1 polypeptide; wherein the 581-589 region has a sequence of SEQ ID NO: 2456. 470. A viral protein (VP) capsid polypeptide, wherein the VP capsid polypeptide comprises a 581-589 region corresponding to residues 581 to 589 of a VP1 polypeptide; wherein the 581-589 region has a sequence of SEQ ID NO: 2278. 471. A viral protein (VP) capsid polypeptide, wherein the VP capsid polypeptide comprises a 581-589 region corresponding to residues 581 to 589 of a VP1 polypeptide; wherein the 581-589 region has a sequence of SEQ ID NO: 5006. 472. A viral protein (VP) capsid polypeptide, wherein the VP capsid polypeptide comprises a 581-589 region corresponding to residues 581 to 589 of a VP1 polypeptide; wherein the 581-589 region has a sequence of SEQ ID NO: 426. 473. A viral protein (VP) capsid polypeptide, wherein the VP capsid polypeptide comprises a 581-589 region corresponding to residues 581 to 589 of a VP1 polypeptide; wherein the 581-589 region has a sequence of SEQ ID NO: 307. 474. A viral protein (VP) capsid polypeptide, wherein the VP capsid polypeptide comprises a 581-589 region corresponding to residues 581 to 589 of a VP1 polypeptide; wherein the 581-589 region has a sequence of SEQ ID NO: 5155. 475. A viral protein (VP) capsid polypeptide, wherein the VP capsid polypeptide comprises a 581-589 region corresponding to residues 581 to 589 of a VP1 polypeptide; wherein the 581-589 region has a sequence of SEQ ID NO: 2640. 476. A viral protein (VP) capsid polypeptide, wherein the VP capsid polypeptide comprises a 581-589 region corresponding to residues 581 to 589 of a VP1 polypeptide; wherein the 581-589 region has a sequence of SEQ ID NO: 4317. 477. A viral protein (VP) capsid polypeptide, wherein the VP capsid polypeptide comprises a 581-589 region corresponding to residues 581 to 589 of a VP1 polypeptide; wherein the 581-589 region has a sequence of SEQ ID NO: 1145. 478. A viral protein (VP) capsid polypeptide, wherein the VP capsid polypeptide comprises a 581-589 region corresponding to residues 581 to 589 of a VP1 polypeptide; wherein the 581-589 region has a sequence of SEQ ID NO: 430. 479. A viral protein (VP) capsid polypeptide, wherein the VP capsid polypeptide comprises a 581-589 region corresponding to residues 581 to 589 of a VP1 polypeptide; wherein the 581-589 region has a sequence of SEQ ID NO: 885. 480. A viral protein (VP) capsid polypeptide, wherein the VP capsid polypeptide comprises a 581-589 region corresponding to residues 581 to 589 of a VP1 polypeptide; wherein the 581-589 region has a sequence of SEQ ID NO: 23. 481. A viral protein (VP) capsid polypeptide, wherein the VP capsid polypeptide comprises a 581-589 region corresponding to residues 581 to 589 of a VP1 polypeptide; wherein the 581-589 region has a sequence of SEQ ID NO: 103. 482. A viral protein (VP) capsid polypeptide, wherein the VP capsid polypeptide comprises a 581-589 region corresponding to residues 581 to 589 of a VP1 polypeptide; wherein the 581-589 region has a sequence of SEQ ID NO: 22. 483. A viral protein (VP) capsid polypeptide, wherein the VP capsid polypeptide comprises a 581-589 region corresponding to residues 581 to 589 of a VP1 polypeptide; wherein the 581-589 region has a sequence of SEQ ID NO: 4031. 484. A viral protein (VP) capsid polypeptide, wherein the VP capsid polypeptide comprises a 581-589 region corresponding to residues 581 to 589 of a VP1 polypeptide; wherein the 581-589 region has a sequence of SEQ ID NO: 1008. 485. A viral protein (VP) capsid polypeptide, wherein the VP capsid polypeptide comprises a 581-589 region corresponding to residues 581 to 589 of a VP1 polypeptide; wherein the 581-589 region has a sequence of SEQ ID NO: 4790. 486. A viral protein (VP) capsid polypeptide, wherein the VP capsid polypeptide comprises a 581-589 region corresponding to residues 581 to 589 of a VP1 polypeptide; wherein the 581-589 region has a sequence of SEQ ID NO: 2522. 487. A viral protein (VP) capsid polypeptide, wherein the VP capsid polypeptide comprises a 581-589 region corresponding to residues 581 to 589 of a VP1 polypeptide; wherein the 581-589 region has a sequence of SEQ ID NO: 1432. 488. A viral protein (VP) capsid polypeptide, wherein the VP capsid polypeptide comprises a 581-589 region corresponding to residues 581 to 589 of a VP1 polypeptide; wherein the 581-589 region has a sequence of SEQ ID NO: 2914. 489. A viral protein (VP) capsid polypeptide, wherein the VP capsid polypeptide comprises a 581-589 region corresponding to residues 581 to 589 of a VP1 polypeptide; wherein the 581-589 region has a sequence of SEQ ID NO: 3935. 490. A viral protein (VP) capsid polypeptide, wherein the VP capsid polypeptide comprises a 581-589 region corresponding to residues 581 to 589 of a VP1 polypeptide; wherein the 581-589 region has a sequence of SEQ ID NO: 5042. 491. A viral protein (VP) capsid polypeptide, wherein the VP capsid polypeptide comprises a 581-589 region corresponding to residues 581 to 589 of a VP1 polypeptide; wherein the 581-589 region has a sequence of SEQ ID NO: 2865. 492. A viral protein (VP) capsid polypeptide, wherein the VP capsid polypeptide comprises a 581-589 region corresponding to residues 581 to 589 of a VP1 polypeptide; wherein the 581-589 region has a sequence of SEQ ID NO: 4264. 493. A viral protein (VP) capsid polypeptide, wherein the VP capsid polypeptide comprises a 581-589 region corresponding to residues 581 to 589 of a VP1 polypeptide; wherein the 581-589 region has a sequence of SEQ ID NO: 964. 494. A viral protein (VP) capsid polypeptide, wherein the VP capsid polypeptide comprises a 581-589 region corresponding to residues 581 to 589 of a VP1 polypeptide; wherein the 581-589 region has a sequence of SEQ ID NO: 1268. 495. A viral protein (VP) capsid polypeptide, wherein the VP capsid polypeptide comprises a 581-589 region corresponding to residues 581 to 589 of a VP1 polypeptide; wherein the 581-589 region has a sequence of SEQ ID NO: 5065. 496. A viral protein (VP) capsid polypeptide, wherein the VP capsid polypeptide comprises a 581-589 region corresponding to residues 581 to 589 of a VP1 polypeptide; wherein the 581-589 region has a sequence of SEQ ID NO: 706. 497. A viral protein (VP) capsid polypeptide, wherein the VP capsid polypeptide comprises a 581-589 region corresponding to residues 581 to 589 of a VP1 polypeptide; wherein the 581-589 region has a sequence of SEQ ID NO: 4704. 498. A viral protein (VP) capsid polypeptide, wherein the VP capsid polypeptide comprises a 581-589 region corresponding to residues 581 to 589 of a VP1 polypeptide; wherein the 581-589 region has a sequence of SEQ ID NO: 569. 499. A viral protein (VP) capsid polypeptide, wherein the VP capsid polypeptide comprises a 581-589 region corresponding to residues 581 to 589 of a VP1 polypeptide; wherein the 581-589 region has a sequence of SEQ ID NO: 2994. 500. A viral protein (VP) capsid polypeptide, wherein the VP capsid polypeptide comprises a 581-589 region corresponding to residues 581 to 589 of a VP1 polypeptide; wherein the 581-589 region has a sequence of SEQ ID NO: 829. 501. A viral protein (VP) capsid polypeptide, wherein the VP capsid polypeptide comprises a 581-589 region corresponding to residues 581 to 589 of a VP1 polypeptide; wherein the 581-589 region has a sequence of SEQ ID NO: 1171. 502. A viral protein (VP) capsid polypeptide, wherein the VP capsid polypeptide comprises a 581-589 region corresponding to residues 581 to 589 of a VP1 polypeptide; wherein the 581-589 region has a sequence of SEQ ID NO: 1041. 503. A viral protein (VP) capsid polypeptide, wherein the VP capsid polypeptide comprises a 581-589 region corresponding to residues 581 to 589 of a VP1 polypeptide; wherein the 581-589 region has a sequence of SEQ ID NO: 5070. 504. A viral protein (VP) capsid polypeptide, wherein the VP capsid polypeptide comprises a 581-589 region corresponding to residues 581 to 589 of a VP1 polypeptide; wherein the 581-589 region has a sequence of SEQ ID NO: 139. 505. A viral protein (VP) capsid polypeptide, wherein the VP capsid polypeptide comprises a 581-589 region corresponding to residues 581 to 589 of a VP1 polypeptide; wherein the 581-589 region has a sequence of SEQ ID NO: 3304. 506. A viral protein (VP) capsid polypeptide, wherein the VP capsid polypeptide comprises a 581-589 region corresponding to residues 581 to 589 of a VP1 polypeptide; wherein the 581-589 region has a sequence of SEQ ID NO: 2431. 507. A viral protein (VP) capsid polypeptide, wherein the VP capsid polypeptide comprises a 581-589 region corresponding to residues 581 to 589 of a VP1 polypeptide; wherein the 581-589 region has a sequence of SEQ ID NO: 4288. 508. A viral protein (VP) capsid polypeptide, wherein the VP capsid polypeptide comprises a 581-589 region corresponding to residues 581 to 589 of a VP1 polypeptide; wherein the 581-589 region has a sequence of SEQ ID NO: 5795. 509. A viral protein (VP) capsid polypeptide, wherein the VP capsid polypeptide comprises a 581-589 region corresponding to residues 581 to 589 of a VP1 polypeptide; wherein the 581-589 region has a sequence of SEQ ID NO: 1300. 510. A viral protein (VP) capsid polypeptide, wherein the VP capsid polypeptide comprises a 581-589 region corresponding to residues 581 to 589 of a VP1 polypeptide; wherein the 581-589 region has a sequence of SEQ ID NO: 724. 511. A viral protein (VP) capsid polypeptide, wherein the VP capsid polypeptide comprises a 581-589 region corresponding to residues 581 to 589 of a VP1 polypeptide; wherein the 581-589 region has a sequence of SEQ ID NO: 1770. 512. A viral protein (VP) capsid polypeptide, wherein the VP capsid polypeptide comprises a 581-589 region corresponding to residues 581 to 589 of a VP1 polypeptide; wherein the 581-589 region has a sequence of SEQ ID NO: 2830. 513. A viral protein (VP) capsid polypeptide, wherein the VP capsid polypeptide comprises a 581-589 region corresponding to residues 581 to 589 of a VP1 polypeptide; wherein the 581-589 region has a sequence of SEQ ID NO: 1972. 514. A viral protein (VP) capsid polypeptide, wherein the VP capsid polypeptide comprises a 581-589 region corresponding to residues 581 to 589 of a VP1 polypeptide; wherein the 581-589 region has a sequence of SEQ ID NO: 1649. 515. A viral protein (VP) capsid polypeptide, wherein the VP capsid polypeptide comprises a 581-589 region corresponding to residues 581 to 589 of a VP1 polypeptide; wherein the 581-589 region has a sequence of SEQ ID NO: 2515. 516. A viral protein (VP) capsid polypeptide, wherein the VP capsid polypeptide comprises a 581-589 region corresponding to residues 581 to 589 of a VP1 polypeptide; wherein the 581-589 region has a sequence of SEQ ID NO: 2849. 517. A viral protein (VP) capsid polypeptide, wherein the VP capsid polypeptide comprises a 581-589 region corresponding to residues 581 to 589 of a VP1 polypeptide; wherein the 581-589 region has a sequence of SEQ ID NO: 3796. 518. A viral protein (VP) capsid polypeptide, wherein the VP capsid polypeptide comprises a 581-589 region corresponding to residues 581 to 589 of a VP1 polypeptide; wherein the 581-589 region has a sequence of SEQ ID NO: 5815. 519. A viral protein (VP) capsid polypeptide, wherein the VP capsid polypeptide comprises a 581-589 region corresponding to residues 581 to 589 of a VP1 polypeptide; wherein the 581-589 region has a sequence of SEQ ID NO: 118. 520. A viral protein (VP) capsid polypeptide, wherein the VP capsid polypeptide comprises a 581-589 region corresponding to residues 581 to 589 of a VP1 polypeptide; wherein the 581-589 region has a sequence of SEQ ID NO: 4766. 521. A viral protein (VP) capsid polypeptide, wherein the VP capsid polypeptide comprises a 581-589 region corresponding to residues 581 to 589 of a VP1 polypeptide; wherein the 581-589 region has a sequence of SEQ ID NO: 770. 522. A viral protein (VP) capsid polypeptide, wherein the VP capsid polypeptide comprises a 581-589 region corresponding to residues 581 to 589 of a VP1 polypeptide; wherein the 581-589 region has a sequence of SEQ ID NO: 1069. 523. A viral protein (VP) capsid polypeptide, wherein the VP capsid polypeptide comprises a 581-589 region corresponding to residues 581 to 589 of a VP1 polypeptide; wherein the 581-589 region has a sequence of SEQ ID NO: 3061. 524. A viral protein (VP) capsid polypeptide, wherein the VP capsid polypeptide comprises a 581-589 region corresponding to residues 581 to 589 of a VP1 polypeptide; wherein the 581-589 region has a sequence of SEQ ID NO: 4290. 525. A viral protein (VP) capsid polypeptide, wherein the VP capsid polypeptide comprises a 581-589 region corresponding to residues 581 to 589 of a VP1 polypeptide; wherein the 581-589 region has a sequence of SEQ ID NO: 4261. 526. A viral protein (VP) capsid polypeptide, wherein the VP capsid polypeptide comprises a 581-589 region corresponding to residues 581 to 589 of a VP1 polypeptide; wherein the 581-589 region has a sequence of SEQ ID NO: 4239. 527. A viral protein (VP) capsid polypeptide, wherein the VP capsid polypeptide comprises a 581-589 region corresponding to residues 581 to 589 of a VP1 polypeptide; wherein the 581-589 region has a sequence of SEQ ID NO: 3478. 528. A viral protein (VP) capsid polypeptide, wherein the VP capsid polypeptide comprises a 581-589 region corresponding to residues 581 to 589 of a VP1 polypeptide; wherein the 581-589 region has a sequence of SEQ ID NO: 1887. 529. A viral protein (VP) capsid polypeptide, wherein the VP capsid polypeptide comprises a 581-589 region corresponding to residues 581 to 589 of a VP1 polypeptide; wherein the 581-589 region has a sequence of SEQ ID NO: 2671. 530. A viral protein (VP) capsid polypeptide, wherein the VP capsid polypeptide comprises a 581-589 region corresponding to residues 581 to 589 of a VP1 polypeptide; wherein the 581-589 region has a sequence of SEQ ID NO: 256. 531. A viral protein (VP) capsid polypeptide, wherein the VP capsid polypeptide comprises a 581-589 region corresponding to residues 581 to 589 of a VP1 polypeptide; wherein the 581-589 region has a sequence of SEQ ID NO: 1256. 532. A viral protein (VP) capsid polypeptide, wherein the VP capsid polypeptide comprises a 581-589 region corresponding to residues 581 to 589 of a VP1 polypeptide; wherein the 581-589 region has a sequence of SEQ ID NO: 719. 533. A viral protein (VP) capsid polypeptide, wherein the VP capsid polypeptide comprises a 581-589 region corresponding to residues 581 to 589 of a VP1 polypeptide; wherein the 581-589 region has a sequence of SEQ ID NO: 1448. 534. A viral protein (VP) capsid polypeptide, wherein the VP capsid polypeptide comprises a 581-589 region corresponding to residues 581 to 589 of a VP1 polypeptide; wherein the 581-589 region has a sequence of SEQ ID NO: 280. 535. A viral protein (VP) capsid polypeptide, wherein the VP capsid polypeptide comprises a 581-589 region corresponding to residues 581 to 589 of a VP1 polypeptide; wherein the 581-589 region has a sequence of SEQ ID NO: 4338. 536. A viral protein (VP) capsid polypeptide, wherein the VP capsid polypeptide comprises a 581-589 region corresponding to residues 581 to 589 of a VP1 polypeptide; wherein the 581-589 region has a sequence of SEQ ID NO: 5037. 537. A viral protein (VP) capsid polypeptide, wherein the VP capsid polypeptide comprises a 581-589 region corresponding to residues 581 to 589 of a VP1 polypeptide; wherein the 581-589 region has a sequence of SEQ ID NO: 1901. 538. A viral protein (VP) capsid polypeptide, wherein the VP capsid polypeptide comprises a 581-589 region corresponding to residues 581 to 589 of a VP1 polypeptide; wherein the 581-589 region has a sequence of SEQ ID NO: 438. 539. A viral protein (VP) capsid polypeptide, wherein the VP capsid polypeptide comprises a 581-589 region corresponding to residues 581 to 589 of a VP1 polypeptide; wherein the 581-589 region has a sequence of SEQ ID NO: 2834. 540. A viral protein (VP) capsid polypeptide, wherein the VP capsid polypeptide comprises a 581-589 region corresponding to residues 581 to 589 of a VP1 polypeptide; wherein the 581-589 region has a sequence of SEQ ID NO: 5491. 541. A viral protein (VP) capsid polypeptide, wherein the VP capsid polypeptide comprises a 581-589 region corresponding to residues 581 to 589 of a VP1 polypeptide; wherein the 581-589 region has a sequence of SEQ ID NO: 4591. 542. A viral protein (VP) capsid polypeptide, wherein the VP capsid polypeptide comprises a 581-589 region corresponding to residues 581 to 589 of a VP1 polypeptide; wherein the 581-589 region has a sequence of SEQ ID NO: 4936. 543. A viral protein (VP) capsid polypeptide, wherein the VP capsid polypeptide comprises a 581-589 region corresponding to residues 581 to 589 of a VP1 polypeptide; wherein the 581-589 region has a sequence of SEQ ID NO: 348. 544. A viral protein (VP) capsid polypeptide, wherein the VP capsid polypeptide comprises a 581-589 region corresponding to residues 581 to 589 of a VP1 polypeptide; wherein the 581-589 region has a sequence of SEQ ID NO: 5607. 545. A viral protein (VP) capsid polypeptide, wherein the VP capsid polypeptide comprises a 581-589 region corresponding to residues 581 to 589 of a VP1 polypeptide; wherein the 581-589 region has a sequence of SEQ ID NO: 4955. 546. A viral protein (VP) capsid polypeptide, wherein the VP capsid polypeptide comprises a 581-589 region corresponding to residues 581 to 589 of a VP1 polypeptide; wherein the 581-589 region has a sequence of SEQ ID NO: 5017. 547. A viral protein (VP) capsid polypeptide, wherein the VP capsid polypeptide comprises a 581-589 region corresponding to residues 581 to 589 of a VP1 polypeptide; wherein the 581-589 region has a sequence of SEQ ID NO: 4349. 548. A viral protein (VP) capsid polypeptide, wherein the VP capsid polypeptide comprises a 581-589 region corresponding to residues 581 to 589 of a VP1 polypeptide; wherein the 581-589 region has a sequence of SEQ ID NO: 4964. 549. A viral protein (VP) capsid polypeptide, wherein the VP capsid polypeptide comprises a 581-589 region corresponding to residues 581 to 589 of a VP1 polypeptide; wherein the 581-589 region has a sequence of SEQ ID NO: 293. 550. A viral protein (VP) capsid polypeptide, wherein the VP capsid polypeptide comprises a 581-589 region corresponding to residues 581 to 589 of a VP1 polypeptide; wherein the 581-589 region has a sequence of SEQ ID NO: 4314. 551. A viral protein (VP) capsid polypeptide, wherein the VP capsid polypeptide comprises a 581-589 region corresponding to residues 581 to 589 of a VP1 polypeptide; wherein the 581-589 region has a sequence of SEQ ID NO: 4995. 552. A viral protein (VP) capsid polypeptide, wherein the VP capsid polypeptide comprises a 581-589 region corresponding to residues 581 to 589 of a VP1 polypeptide; wherein the 581-589 region has a sequence of SEQ ID NO: 4366. 553. A viral protein (VP) capsid polypeptide, wherein the VP capsid polypeptide comprises a 581-589 region corresponding to residues 581 to 589 of a VP1 polypeptide; wherein the 581-589 region has a sequence of SEQ ID NO: 4961. 554. A viral protein (VP) capsid polypeptide, wherein the VP capsid polypeptide comprises a 581-589 region corresponding to residues 581 to 589 of a VP1 polypeptide; wherein the 581-589 region has a sequence of SEQ ID NO: 4952. 555. A viral protein (VP) capsid polypeptide, wherein the VP capsid polypeptide comprises a 581-589 region corresponding to residues 581 to 589 of a VP1 polypeptide; wherein the 581-589 region has a sequence of SEQ ID NO: 5075. 556. A viral protein (VP) capsid polypeptide, wherein the VP capsid polypeptide comprises a 581-589 region corresponding to residues 581 to 589 of a VP1 polypeptide; wherein the 581-589 region has a sequence of SEQ ID NO: 4354. 557. A viral protein (VP) capsid polypeptide, wherein the VP capsid polypeptide comprises a 581-589 region corresponding to residues 581 to 589 of a VP1 polypeptide; wherein the 581-589 region has a sequence of SEQ ID NO: 5060. 558. A viral protein (VP) capsid polypeptide, wherein the VP capsid polypeptide comprises a 581-589 region corresponding to residues 581 to 589 of a VP1 polypeptide; wherein the 581-589 region has a sequence of SEQ ID NO: 5138. 559. A viral protein (VP) capsid polypeptide, wherein the VP capsid polypeptide comprises a 581-589 region corresponding to residues 581 to 589 of a VP1 polypeptide; wherein the 581-589 region has a sequence of SEQ ID NO: 5206. 560. A viral protein (VP) capsid polypeptide, wherein the VP capsid polypeptide comprises a 581-589 region corresponding to residues 581 to 589 of a VP1 polypeptide; wherein the 581-589 region has a sequence of SEQ ID NO: 5283. 561. A viral protein (VP) capsid polypeptide, wherein the VP capsid polypeptide comprises a 581-589 region corresponding to residues 581 to 589 of a VP1 polypeptide; wherein the 581-589 region has a sequence of SEQ ID NO: 5092. 562. A viral protein (VP) capsid polypeptide, wherein the VP capsid polypeptide comprises a 581-589 region corresponding to residues 581 to 589 of a VP1 polypeptide; wherein the 581-589 region has a sequence of SEQ ID NO: 4059. 563. A viral protein (VP) capsid polypeptide, wherein the VP capsid polypeptide comprises a 581-589 region corresponding to residues 581 to 589 of a VP1 polypeptide; wherein the 581-589 region has a sequence of SEQ ID NO: 4295. 564. A viral protein (VP) capsid polypeptide, wherein the VP capsid polypeptide comprises a 581-589 region corresponding to residues 581 to 589 of a VP1 polypeptide; wherein the 581-589 region has a sequence of SEQ ID NO: 5030. 565. A viral protein (VP) capsid polypeptide, wherein the VP capsid polypeptide comprises a 581-589 region corresponding to residues 581 to 589 of a VP1 polypeptide; wherein the 581-589 region has a sequence of SEQ ID NO: 4938. 566. A viral protein (VP) capsid polypeptide, wherein the VP capsid polypeptide comprises a 581-589 region corresponding to residues 581 to 589 of a VP1 polypeptide; wherein the 581-589 region has a sequence of SEQ ID NO: 5215. 567. A viral protein (VP) capsid polypeptide, wherein the VP capsid polypeptide comprises a 581-589 region corresponding to residues 581 to 589 of a VP1 polypeptide; wherein the 581-589 region has a sequence of SEQ ID NO: 4960. 568. A viral protein (VP) capsid polypeptide, wherein the VP capsid polypeptide comprises a 581-589 region corresponding to residues 581 to 589 of a VP1 polypeptide; wherein the 581-589 region has a sequence of SEQ ID NO: 4969. 569. A viral protein (VP) capsid polypeptide, wherein the VP capsid polypeptide comprises a 581-589 region corresponding to residues 581 to 589 of a VP1 polypeptide; wherein the 581-589 region has a sequence of SEQ ID NO: 5023. 570. A viral protein (VP) capsid polypeptide, wherein the VP capsid polypeptide comprises a 581-589 region corresponding to residues 581 to 589 of a VP1 polypeptide; wherein the 581-589 region has a sequence of SEQ ID NO: 4934. 571. A viral protein (VP) capsid polypeptide, wherein the VP capsid polypeptide comprises a 581-589 region corresponding to residues 581 to 589 of a VP1 polypeptide; wherein the 581-589 region has a sequence of SEQ ID NO: 4963. 572. A viral protein (VP) capsid polypeptide, wherein the VP capsid polypeptide comprises a 581-589 region corresponding to residues 581 to 589 of a VP1 polypeptide; wherein the 581-589 region has a sequence of SEQ ID NO: 4363. 573. A viral protein (VP) capsid polypeptide, wherein the VP capsid polypeptide comprises a 581-589 region corresponding to residues 581 to 589 of a VP1 polypeptide; wherein the 581-589 region has a sequence of SEQ ID NO: 5159. 574. A viral protein (VP) capsid polypeptide, wherein the VP capsid polypeptide comprises a 581-589 region corresponding to residues 581 to 589 of a VP1 polypeptide; wherein the 581-589 region has a sequence of SEQ ID NO: 4973. 575. A viral protein (VP) capsid polypeptide, wherein the VP capsid polypeptide comprises a 581-589 region corresponding to residues 581 to 589 of a VP1 polypeptide; wherein the 581-589 region has a sequence of SEQ ID NO: 5157. 576. A viral protein (VP) capsid polypeptide, wherein the VP capsid polypeptide comprises a 581-589 region corresponding to residues 581 to 589 of a VP1 polypeptide; wherein the 581-589 region has a sequence of SEQ ID NO: 4972. 577. A viral protein (VP) capsid polypeptide, wherein the VP capsid polypeptide comprises a 581-589 region corresponding to residues 581 to 589 of a VP1 polypeptide; wherein the 581-589 region has a sequence of SEQ ID NO: 4345. 578. A viral protein (VP) capsid polypeptide, wherein the VP capsid polypeptide comprises a 581-589 region corresponding to residues 581 to 589 of a VP1 polypeptide; wherein the 581-589 region has a sequence of SEQ ID NO: 5039. 579. A viral protein (VP) capsid polypeptide, wherein the VP capsid polypeptide comprises a 581-589 region corresponding to residues 581 to 589 of a VP1 polypeptide; wherein the 581-589 region has a sequence of SEQ ID NO: 5163. 580. A viral protein (VP) capsid polypeptide, wherein the VP capsid polypeptide comprises a 581-589 region corresponding to residues 581 to 589 of a VP1 polypeptide; wherein the 581-589 region has a sequence of SEQ ID NO: 5040. 581. A viral protein (VP) capsid polypeptide, wherein the VP capsid polypeptide comprises a 581-589 region corresponding to residues 581 to 589 of a VP1 polypeptide; wherein the 581-589 region has a sequence of SEQ ID NO: 4304. 582. A viral protein (VP) capsid polypeptide, wherein the VP capsid polypeptide comprises a 581-589 region corresponding to residues 581 to 589 of a VP1 polypeptide; wherein the 581-589 region has a sequence of SEQ ID NO: 5193. 583. A viral protein (VP) capsid polypeptide, wherein the VP capsid polypeptide comprises a 581-589 region corresponding to residues 581 to 589 of a VP1 polypeptide; wherein the 581-589 region has a sequence of SEQ ID NO: 5077. 584. A viral protein (VP) capsid polypeptide, wherein the VP capsid polypeptide comprises a 581-589 region corresponding to residues 581 to 589 of a VP1 polypeptide; wherein the 581-589 region has a sequence of SEQ ID NO: 5814. 585. A viral protein (VP) capsid polypeptide, wherein the VP capsid polypeptide comprises a 581-589 region corresponding to residues 581 to 589 of a VP1 polypeptide; wherein the 581-589 region has a sequence of SEQ ID NO: 386. 586. A viral protein (VP) capsid polypeptide, wherein the VP capsid polypeptide comprises a 581-589 region corresponding to residues 581 to 589 of a VP1 polypeptide; wherein the 581-589 region has a sequence of SEQ ID NO: 5081. 587. A viral protein (VP) capsid polypeptide, wherein the VP capsid polypeptide comprises a 581-589 region corresponding to residues 581 to 589 of a VP1 polypeptide; wherein the 581-589 region has a sequence of SEQ ID NO: 308. 588. A viral protein (VP) capsid polypeptide, wherein the VP capsid polypeptide comprises a 581-589 region corresponding to residues 581 to 589 of a VP1 polypeptide; wherein the 581-589 region has a sequence of SEQ ID NO: 278. 589. A viral protein (VP) capsid polypeptide, wherein the VP capsid polypeptide comprises a 581-589 region corresponding to residues 581 to 589 of a VP1 polypeptide; wherein the 581-589 region has a sequence of SEQ ID NO: 5127. 590. A viral protein (VP) capsid polypeptide, wherein the VP capsid polypeptide comprises a 581-589 region corresponding to residues 581 to 589 of a VP1 polypeptide; wherein the 581-589 region has a sequence of SEQ ID NO: 5029. 591. A viral protein (VP) capsid polypeptide, wherein the VP capsid polypeptide comprises a 581-589 region corresponding to residues 581 to 589 of a VP1 polypeptide; wherein the 581-589 region has a sequence of SEQ ID NO: 5143. 592. A viral protein (VP) capsid polypeptide, wherein the VP capsid polypeptide comprises a 581-589 region corresponding to residues 581 to 589 of a VP1 polypeptide; wherein the 581-589 region has a sequence of SEQ ID NO: 4983. 593. A viral protein (VP) capsid polypeptide, wherein the VP capsid polypeptide comprises a 581-589 region corresponding to residues 581 to 589 of a VP1 polypeptide; wherein the 581-589 region has a sequence of SEQ ID NO: 4361. 594. A viral protein (VP) capsid polypeptide, wherein the VP capsid polypeptide comprises a 581-589 region corresponding to residues 581 to 589 of a VP1 polypeptide; wherein the 581-589 region has a sequence of SEQ ID NO: 5080. 595. A viral protein (VP) capsid polypeptide, wherein the VP capsid polypeptide comprises a 581-589 region corresponding to residues 581 to 589 of a VP1 polypeptide; wherein the 581-589 region has a sequence of SEQ ID NO: 4343. 596. A viral protein (VP) capsid polypeptide, wherein the VP capsid polypeptide comprises a 581-589 region corresponding to residues 581 to 589 of a VP1 polypeptide; wherein the 581-589 region has a sequence of SEQ ID NO: 4986. 597. A viral protein (VP) capsid polypeptide, wherein the VP capsid polypeptide comprises a 581-589 region corresponding to residues 581 to 589 of a VP1 polypeptide; wherein the 581-589 region has a sequence of SEQ ID NO: 4311. 598. A viral protein (VP) capsid polypeptide, wherein the VP capsid polypeptide comprises a 581-589 region corresponding to residues 581 to 589 of a VP1 polypeptide; wherein the 581-589 region has a sequence of SEQ ID NO: 5102. 599. A viral protein (VP) capsid polypeptide, wherein the VP capsid polypeptide comprises a 581-589 region corresponding to residues 581 to 589 of a VP1 polypeptide; wherein the 581-589 region has a sequence of SEQ ID NO: 5280. 600. A viral protein (VP) capsid polypeptide, wherein the VP capsid polypeptide comprises a 581-589 region corresponding to residues 581 to 589 of a VP1 polypeptide; wherein the 581-589 region has a sequence of SEQ ID NO: 5185. 601. A viral protein (VP) capsid polypeptide, wherein the VP capsid polypeptide comprises a 581-589 region corresponding to residues 581 to 589 of a VP1 polypeptide; wherein the 581-589 region has a sequence of SEQ ID NO: 4935. 602. A viral protein (VP) capsid polypeptide, wherein the VP capsid polypeptide comprises a 581-589 region corresponding to residues 581 to 589 of a VP1 polypeptide; wherein the 581-589 region has a sequence of SEQ ID NO: 4379. 603. A viral protein (VP) capsid polypeptide, wherein the VP capsid polypeptide comprises a 581-589 region corresponding to residues 581 to 589 of a VP1 polypeptide; wherein the 581-589 region has a sequence of SEQ ID NO: 5052. 604. A viral protein (VP) capsid polypeptide, wherein the VP capsid polypeptide comprises a 581-589 region corresponding to residues 581 to 589 of a VP1 polypeptide; wherein the 581-589 region has a sequence of SEQ ID NO: 5027. 605. A viral protein (VP) capsid polypeptide, wherein the VP capsid polypeptide comprises a 581-589 region corresponding to residues 581 to 589 of a VP1 polypeptide; wherein the 581-589 region has a sequence of SEQ ID NO: 5173. 606. A viral protein (VP) capsid polypeptide, wherein the VP capsid polypeptide comprises a 581-589 region corresponding to residues 581 to 589 of a VP1 polypeptide; wherein the 581-589 region has a sequence of SEQ ID NO: 5055. 607. A viral protein (VP) capsid polypeptide, wherein the VP capsid polypeptide comprises a 581-589 region corresponding to residues 581 to 589 of a VP1 polypeptide; wherein the 581-589 region has a sequence of SEQ ID NO: 5123. 608. A viral protein (VP) capsid polypeptide, wherein the VP capsid polypeptide comprises a 581-589 region corresponding to residues 581 to 589 of a VP1 polypeptide; wherein the 581-589 region has a sequence of SEQ ID NO: 4335. 609. A viral protein (VP) capsid polypeptide, wherein the VP capsid polypeptide comprises a 581-589 region corresponding to residues 581 to 589 of a VP1 polypeptide; wherein the 581-589 region has a sequence of SEQ ID NO: 5208. 610. A viral protein (VP) capsid polypeptide, wherein the VP capsid polypeptide comprises a 581-589 region corresponding to residues 581 to 589 of a VP1 polypeptide; wherein the 581-589 region has a sequence of SEQ ID NO: 4633. 611. A viral protein (VP) capsid polypeptide, wherein the VP capsid polypeptide comprises a 581-589 region corresponding to residues 581 to 589 of a VP1 polypeptide; wherein the 581-589 region has a sequence of SEQ ID NO: 4359. 612. A viral protein (VP) capsid polypeptide, wherein the VP capsid polypeptide comprises a 581-589 region corresponding to residues 581 to 589 of a VP1 polypeptide; wherein the 581-589 region has a sequence of SEQ ID NO: 289. 613. A viral protein (VP) capsid polypeptide, wherein the VP capsid polypeptide comprises a 581-589 region corresponding to residues 581 to 589 of a VP1 polypeptide; wherein the 581-589 region has a sequence of SEQ ID NO: 4353. 614. A viral protein (VP) capsid polypeptide, wherein the VP capsid polypeptide comprises a 581-589 region corresponding to residues 581 to 589 of a VP1 polypeptide; wherein the 581-589 region has a sequence of SEQ ID NO: 4316. 615. A viral protein (VP) capsid polypeptide, wherein the VP capsid polypeptide comprises a 581-589 region corresponding to residues 581 to 589 of a VP1 polypeptide; wherein the 581-589 region has a sequence of SEQ ID NO: 5210. 616. A viral protein (VP) capsid polypeptide, wherein the VP capsid polypeptide comprises a 581-589 region corresponding to residues 581 to 589 of a VP1 polypeptide; wherein the 581-589 region has a sequence of SEQ ID NO: 4949. 617. A viral protein (VP) capsid polypeptide, wherein the VP capsid polypeptide comprises a 581-589 region corresponding to residues 581 to 589 of a VP1 polypeptide; wherein the 581-589 region has a sequence of SEQ ID NO: 4947. 618. A viral protein (VP) capsid polypeptide, wherein the VP capsid polypeptide comprises a 581-589 region corresponding to residues 581 to 589 of a VP1 polypeptide; wherein the 581-589 region has a sequence of SEQ ID NO: 2838. 619. A viral protein (VP) capsid polypeptide, wherein the VP capsid polypeptide comprises a 581-589 region corresponding to residues 581 to 589 of a VP1 polypeptide; wherein the 581-589 region has a sequence of SEQ ID NO: 378. 620. A viral protein (VP) capsid polypeptide, wherein the VP capsid polypeptide comprises a 581-589 region corresponding to residues 581 to 589 of a VP1 polypeptide; wherein the 581-589 region has a sequence of SEQ ID NO: 5013. 621. A viral protein (VP) capsid polypeptide, wherein the VP capsid polypeptide comprises a 581-589 region corresponding to residues 581 to 589 of a VP1 polypeptide; wherein the 581-589 region has a sequence of SEQ ID NO: 5278. 622. A viral protein (VP) capsid polypeptide, wherein the VP capsid polypeptide comprises a 581-589 region corresponding to residues 581 to 589 of a VP1 polypeptide; wherein the 581-589 region has a sequence of SEQ ID NO: 1471. 623. A viral protein (VP) capsid polypeptide, wherein the VP capsid polypeptide comprises a 581-589 region corresponding to residues 581 to 589 of a VP1 polypeptide; wherein the 581-589 region has a sequence of SEQ ID NO: 4346. 624. A viral protein (VP) capsid polypeptide, wherein the VP capsid polypeptide comprises a 581-589 region corresponding to residues 581 to 589 of a VP1 polypeptide; wherein the 581-589 region has a sequence of SEQ ID NO: 297. 625. A viral protein (VP) capsid polypeptide, wherein the VP capsid polypeptide comprises a 581-589 region corresponding to residues 581 to 589 of a VP1 polypeptide; wherein the 581-589 region has a sequence of SEQ ID NO: 4993. 626. A viral protein (VP) capsid polypeptide, wherein the VP capsid polypeptide comprises a 581-589 region corresponding to residues 581 to 589 of a VP1 polypeptide; wherein the 581-589 region has a sequence of SEQ ID NO: 384. 627. A viral protein (VP) capsid polypeptide, wherein the VP capsid polypeptide comprises a 581-589 region corresponding to residues 581 to 589 of a VP1 polypeptide; wherein the 581-589 region has a sequence of SEQ ID NO: 5062. 628. A viral protein (VP) capsid polypeptide, wherein the VP capsid polypeptide comprises a 581-589 region corresponding to residues 581 to 589 of a VP1 polypeptide; wherein the 581-589 region has a sequence of SEQ ID NO: 4945. 629. A viral protein (VP) capsid polypeptide, wherein the VP capsid polypeptide comprises a 581-589 region corresponding to residues 581 to 589 of a VP1 polypeptide; wherein the 581-589 region has a sequence of SEQ ID NO: 210. 630. A viral protein (VP) capsid polypeptide, wherein the VP capsid polypeptide comprises a 581-589 region corresponding to residues 581 to 589 of a VP1 polypeptide; wherein the 581-589 region has a sequence of SEQ ID NO: 4009. 631. A viral protein (VP) capsid polypeptide, wherein the VP capsid polypeptide comprises a 581-589 region corresponding to residues 581 to 589 of a VP1 polypeptide; wherein the 581-589 region has a sequence of SEQ ID NO: 5190. 632. A viral protein (VP) capsid polypeptide, wherein the VP capsid polypeptide comprises a 581-589 region corresponding to residues 581 to 589 of a VP1 polypeptide; wherein the 581-589 region has a sequence of SEQ ID NO: 1561. 633. A viral protein (VP) capsid polypeptide, wherein the VP capsid polypeptide comprises a 581-589 region corresponding to residues 581 to 589 of a VP1 polypeptide; wherein the 581-589 region has a sequence of SEQ ID NO: 5147. 634. A viral protein (VP) capsid polypeptide, wherein the VP capsid polypeptide comprises a 581-589 region corresponding to residues 581 to 589 of a VP1 polypeptide; wherein the 581-589 region has a sequence of SEQ ID NO: 4238. 635. A viral protein (VP) capsid polypeptide, wherein the VP capsid polypeptide comprises a 581-589 region corresponding to residues 581 to 589 of a VP1 polypeptide; wherein the 581-589 region has a sequence of SEQ ID NO: 5527. 636. A viral protein (VP) capsid polypeptide, wherein the VP capsid polypeptide comprises a 581-589 region corresponding to residues 581 to 589 of a VP1 polypeptide; wherein the 581-589 region has a sequence of SEQ ID NO: 4355. 637. A viral protein (VP) capsid polypeptide, wherein the VP capsid polypeptide comprises a 581-589 region corresponding to residues 581 to 589 of a VP1 polypeptide; wherein the 581-589 region has a sequence of SEQ ID NO: 5125. 638. A viral protein (VP) capsid polypeptide, wherein the VP capsid polypeptide comprises a 581-589 region corresponding to residues 581 to 589 of a VP1 polypeptide; wherein the 581-589 region has a sequence of SEQ ID NO: 4108. 639. A viral protein (VP) capsid polypeptide, wherein the VP capsid polypeptide comprises a 581-589 region corresponding to residues 581 to 589 of a VP1 polypeptide; wherein the 581-589 region has a sequence of SEQ ID NO: 2948. 640. A viral protein (VP) capsid polypeptide, wherein the VP capsid polypeptide comprises a 581-589 region corresponding to residues 581 to 589 of a VP1 polypeptide; wherein the 581-589 region has a sequence of SEQ ID NO: 3821. 641. A viral protein (VP) capsid polypeptide, wherein the VP capsid polypeptide comprises a 581-589 region corresponding to residues 581 to 589 of a VP1 polypeptide; wherein the 581-589 region has a sequence of SEQ ID NO: 4632. 642. A viral protein (VP) capsid polypeptide, wherein the VP capsid polypeptide comprises a 581-589 region corresponding to residues 581 to 589 of a VP1 polypeptide; wherein the 581-589 region has a sequence of SEQ ID NO: 294. 643. A viral protein (VP) capsid polypeptide, wherein the VP capsid polypeptide comprises a 581-589 region corresponding to residues 581 to 589 of a VP1 polypeptide; wherein the 581-589 region has a sequence of SEQ ID NO: 4943. 644. A viral protein (VP) capsid polypeptide, wherein the VP capsid polypeptide comprises a 581-589 region corresponding to residues 581 to 589 of a VP1 polypeptide; wherein the 581-589 region has a sequence of SEQ ID NO: 1391. 645. A viral protein (VP) capsid polypeptide, wherein the VP capsid polypeptide comprises a 581-589 region corresponding to residues 581 to 589 of a VP1 polypeptide; wherein the 581-589 region has a sequence of SEQ ID NO: 5078. 646. A viral protein (VP) capsid polypeptide, wherein the VP capsid polypeptide comprises a 581-589 region corresponding to residues 581 to 589 of a VP1 polypeptide; wherein the 581-589 region has a sequence of SEQ ID NO: 3299. 647. A viral protein (VP) capsid polypeptide, wherein the VP capsid polypeptide comprises a 581-589 region corresponding to residues 581 to 589 of a VP1 polypeptide; wherein the 581-589 region has a sequence of SEQ ID NO: 2897. 648. A viral protein (VP) capsid polypeptide, wherein the VP capsid polypeptide comprises a 581-589 region corresponding to residues 581 to 589 of a VP1 polypeptide; wherein the 581-589 region has a sequence of SEQ ID NO: 1537. 649. A viral protein (VP) capsid polypeptide, wherein the VP capsid polypeptide comprises a 581-589 region corresponding to residues 581 to 589 of a VP1 polypeptide; wherein the 581-589 region has a sequence of SEQ ID NO: 5255. 650. A viral protein (VP) capsid polypeptide, wherein the VP capsid polypeptide comprises a 581-589 region corresponding to residues 581 to 589 of a VP1 polypeptide; wherein the 581-589 region has a sequence of SEQ ID NO: 141. 651. A viral protein (VP) capsid polypeptide, wherein the VP capsid polypeptide comprises a 581-589 region corresponding to residues 581 to 589 of a VP1 polypeptide; wherein the 581-589 region has a sequence of SEQ ID NO: 5038. 652. A viral protein (VP) capsid polypeptide, wherein the VP capsid polypeptide comprises a 581-589 region corresponding to residues 581 to 589 of a VP1 polypeptide; wherein the 581-589 region has a sequence of SEQ ID NO: 5153. 653. A viral protein (VP) capsid polypeptide, wherein the VP capsid polypeptide comprises a 581-589 region corresponding to residues 581 to 589 of a VP1 polypeptide; wherein the 581-589 region has a sequence of SEQ ID NO: 1181. 654. A viral protein (VP) capsid polypeptide, wherein the VP capsid polypeptide comprises a 581-589 region corresponding to residues 581 to 589 of a VP1 polypeptide; wherein the 581-589 region has a sequence of SEQ ID NO: 1204. 655. A viral protein (VP) capsid polypeptide, wherein the VP capsid polypeptide comprises a 581-589 region corresponding to residues 581 to 589 of a VP1 polypeptide; wherein the 581-589 region has a sequence of SEQ ID NO: 4404. 656. A viral protein (VP) capsid polypeptide, wherein the VP capsid polypeptide comprises a 581-589 region corresponding to residues 581 to 589 of a VP1 polypeptide; wherein the 581-589 region has a sequence of SEQ ID NO: 5106. 657. A viral protein (VP) capsid polypeptide, wherein the VP capsid polypeptide comprises a 581-589 region corresponding to residues 581 to 589 of a VP1 polypeptide; wherein the 581-589 region has a sequence of SEQ ID NO: 2779. 658. A viral protein (VP) capsid polypeptide, wherein the VP capsid polypeptide comprises a 581-589 region corresponding to residues 581 to 589 of a VP1 polypeptide; wherein the 581-589 region has a sequence of SEQ ID NO: 1824. 659. A viral protein (VP) capsid polypeptide, wherein the VP capsid polypeptide comprises a 581-589 region corresponding to residues 581 to 589 of a VP1 polypeptide; wherein the 581-589 region has a sequence of SEQ ID NO: 5116. 660. A viral protein (VP) capsid polypeptide, wherein the VP capsid polypeptide comprises a 581-589 region corresponding to residues 581 to 589 of a VP1 polypeptide; wherein the 581-589 region has a sequence of SEQ ID NO: 3179. 661. A viral protein (VP) capsid polypeptide, wherein the VP capsid polypeptide comprises a 581-589 region corresponding to residues 581 to 589 of a VP1 polypeptide; wherein the 581-589 region has a sequence of SEQ ID NO: 98. 662. A viral protein (VP) capsid polypeptide, wherein the VP capsid polypeptide comprises a 581-589 region corresponding to residues 581 to 589 of a VP1 polypeptide; wherein the 581-589 region has a sequence of SEQ ID NO: 1872. 663. A viral protein (VP) capsid polypeptide, wherein the VP capsid polypeptide comprises a 581-589 region corresponding to residues 581 to 589 of a VP1 polypeptide; wherein the 581-589 region has a sequence of SEQ ID NO: 1634. 664. A viral protein (VP) capsid polypeptide, wherein the VP capsid polypeptide comprises a 581-589 region corresponding to residues 581 to 589 of a VP1 polypeptide; wherein the 581-589 region has a sequence of SEQ ID NO: 1060. 665. A viral protein (VP) capsid polypeptide, wherein the VP capsid polypeptide comprises a 581-589 region corresponding to residues 581 to 589 of a VP1 polypeptide; wherein the 581-589 region has a sequence of SEQ ID NO: 4941. 666. A viral protein (VP) capsid polypeptide, wherein the VP capsid polypeptide comprises a 581-589 region corresponding to residues 581 to 589 of a VP1 polypeptide; wherein the 581-589 region has a sequence of SEQ ID NO: 4981. 667. A viral protein (VP) capsid polypeptide, wherein the VP capsid polypeptide comprises a 581-589 region corresponding to residues 581 to 589 of a VP1 polypeptide; wherein the 581-589 region has a sequence of SEQ ID NO: 5274. 668. A viral protein (VP) capsid polypeptide, wherein the VP capsid polypeptide comprises a 581-589 region corresponding to residues 581 to 589 of a VP1 polypeptide; wherein the 581-589 region has a sequence of SEQ ID NO: 5816. 669. A viral protein (VP) capsid polypeptide, wherein the VP capsid polypeptide comprises a 581-589 region corresponding to residues 581 to 589 of a VP1 polypeptide; wherein the 581-589 region has a sequence of SEQ ID NO: 2842. 670. A viral protein (VP) capsid polypeptide, wherein the VP capsid polypeptide comprises a 581-589 region corresponding to residues 581 to 589 of a VP1 polypeptide; wherein the 581-589 region has a sequence of SEQ ID NO: 1934. 671. A viral protein (VP) capsid polypeptide, wherein the VP capsid polypeptide comprises a 581-589 region corresponding to residues 581 to 589 of a VP1 polypeptide; wherein the 581-589 region has a sequence of SEQ ID NO: 5817. 672. A viral protein (VP) capsid polypeptide, wherein the VP capsid polypeptide comprises a 581-589 region corresponding to residues 581 to 589 of a VP1 polypeptide; wherein the 581-589 region has a sequence of SEQ ID NO: 3998. 673. A viral protein (VP) capsid polypeptide, wherein the VP capsid polypeptide comprises a 581-589 region corresponding to residues 581 to 589 of a VP1 polypeptide; wherein the 581-589 region has a sequence of SEQ ID NO: 5026.

### EXAMPLES

[0315] Below are examples of specific embodiments for carrying out the present invention. The examples are offered for illustrative purposes only and are not intended to limit the scope of the present invention in any way. Efforts have been made to ensure accuracy with respect to numbers used (e.g., amounts, temperatures, etc.), but some experimental error and deviation should, of course, be allowed for.

[0316] The practice of the present invention will employ, unless otherwise indicated, conventional methods of protein chemistry, biochemistry, recombinant DNA techniques and pharmacology, within the skill of the art. Such techniques are explained fully in the literature.

### Example 1

### High Throughput Capsid Engineering Systems

[0317] This example describes the high throughput capsid engineering systems and methods disclosed herein to discover engineered tissue tropic AAV variants, including CNS tissue-tropic variants and muscle-tropic variants. The high throughput capsid engineering system is schematized in FIG. 1. “Detargeting” may be referred to herein as “sparing” with respect to a particular tissue. For example, liver detargeting or liver sparing may both be used herein to refer to variants or properties of variants that preferentially exhibit reduced homing to liver tissue.

[0318] Tissues were harvested and transducing capsid genes are labeled with unique molecular identifiers and barcodes. These variant sequences/UMIs/barcodes were parameterized, and machine learning algorithms were used to identify deterministic features of specific tissue targeting/detargeting capsids.

[0319] FIG. 2A provides a side view (top panel) and top view (bottom panel) of key residues of known AAV capsids that have been shown to interact with target cells. FIG. 2B illustrates salient features of the AAV capsid library, showing the region of introduced diversity, with residue numbering corresponding to the numbering of amino acids in AAV5 VP1. The library plasmid includes the invariant rep and diversified cap coding sequences between AAV ITRs (a cis-packaging approach).

[0320] The variants in the AAV capsid library were able to assemble at levels similar to that of wild type AAVs. FIG. 7A illustrates the normalized counts of plasmid library DNA compared to assembled virus DNA for wild type AAV controls (textured points) and for variant AAV candidates (gray circles). Levels of assembled virus for variant AAV candidates were comparable to wild type AAV controls at 1× spike-in frequency.

### Example 2

AAV5 Variants with Tissue Tropism in CNS

[0321] This example describes engineered AAV5 variants with tissue tropism in CNS that were discovered using the methods and systems described in EXAMPLE 1.

[0322] AAV5 variants found to exhibit CNS tropism included SEQ ID NO: 12-SEQ ID NO: 3937 and SEQ ID NO: 5234-SEQ ID NO: 5807). Variant residues are in the 581-589 region corresponding to positions 581 to 589 of VP1.

[0323] TABLE 2 and TABLE 4 provide sequences of 581-589 regions, corresponding to residues 581 to 589 of VP1, for variant AAV VP capsid polypeptides that were found in CNS tissue. The present disclosure, thus, provides for rAAVs composed of engineered AAV5 VP1 capsid polypeptides having a SEQ ID NO: 2, wherein the X¹ to X⁹ region is any one of SEQ ID NO: SEQ ID NO: 12-SEQ ID NO: 3937 or SEQ ID NO: 5234-SEQ ID NO: 5807, as disclosed in TABLE 2 and TABLE 4. Also encompassed herein are rAAVs composed of engineered AAV5 VP2 capsid polypeptides and engineered AAV5 VP3 capsid polypeptides having the sequences disclosed in the below table at the regions in AAV5 VP2 (amino acid residues 445 to 453) and AAV5 VP3 (amino acid residues 389 to 397) corresponding to the amino acids in the AAV5 VP1 581 to 589 region.

[0324] Library members selected as CNS-tropic candidates showed greater enrichment in CNS tissue relative to liver (FIG. 7B) or muscle (FIG. 7C) that wild type AAVs or other AAV library members. FIG. 7B shows DNA levels in liver versus CNS for variant AAV candidates (gray circles), wild type controls (textured points), and select AAV candidates with CNS tropism (open circles). CNS-tropic AAV candidates were enriched in CNS tissue relative to liver tissue. FIG. 7C shows DNA levels in muscle versus CNS for variant AAV candidates (gray circles), wild type controls (textured points), and select AAV candidates with CNS tropism (open circles). CNS-tropic AAV candidates were enriched in CNS tissue relative to muscle tissue.

[0325] FIG. 4 is a bar graph showing relative accumulation, expressed as log 10 fold change in brain accumulation relative to other tissues, of variant AAV capsids comprising 581-589 regions of SEQ ID NO: 415 (DARVYRALD), SEQ ID NO: 569 (DSASPIMGM), SEQ ID NO: 428 (DAWQMLSGN), SEQ ID NO: 430 (DAWSYQCYH), SEQ ID NO: 708 (EAWMYHQFH), SEQ ID NO: 3906 (YSGVRVTGY), SEQ ID NO: 709 (EAWSKLEQP), SEQ ID NO: 3297 (TAGRFNYFD), SEQ ID NO: 1956 (LVGWTLQHV), SEQ ID NO: 885 (ESWMKLEWQ), SEQ ID NO: 3283 (TAAFAYKYE), SEQ ID NO: 3472 (TSHYITFTP), SEQ ID NO: 426 (DAWMMMWGS), SEQ ID NO: 3306 (TANVYRSGQ), SEQ ID NO: 1971 (LWGWTLQHQ), SEQ ID NO: 425 (DAWLQLKDN), SEQ ID NO: 262 (CATRFNIGG), SEQ ID NO: 424 (DAWCFISSY), SEQ ID NO: 18 (AAGRFNYFG), SEQ ID NO: 54 (AEDYWDLGA), or SEQ ID NO: 2028 (MDDICEFYA). Accumulation was compared to wild type AAV capsids of AAV9, AAV1, AAV PHP.B, AAV2, and AAV5.

### Example 3

### AAV5 Variants with Tissue Tropism in Muscle

[0326] This example describes engineered AAV5 variants with tissue tropism in muscle that were discovered using the methods and systems described in EXAMPLE 1.

[0327] AAV5 variants found to exhibit muscle tropism included SEQ ID NO: 4238-SEQ ID NO: 4933 and SEQ ID NO: 5808-SEQ ID NO: 5811. Variant residues are in the 581-589 region corresponding to positions 581 to 589 of VP1.

[0328] TABLE 5 and TABLE 7 provide sequences of 581-589 regions, corresponding to residues 581 to 589 of VP1, for variant AAV VP capsid polypeptides that were found in muscle tissue. The present disclosure, thus, provides for rAAVs composed of engineered AAV5 VP1 capsid polypeptides having a SEQ ID NO: 2, wherein the X¹ to X⁹ region is any one of SEQ ID NO: 4238-SEQ ID NO: 4933 or SEQ ID NO: 5808-SEQ ID NO: 5811, as disclosed in TABLE 5 and TABLE 7. Also encompassed herein are rAAVs composed of engineered AAV5 VP2 capsid polypeptides and engineered AAV5 VP3 capsid polypeptides having the sequences disclosed in TABLE 5 and TABLE 7 at the regions in AAV5 VP2 (amino acid residues 445 to 453) and AAV5 VP3 (amino acid residues 389 to 397) corresponding to the amino acids in the AAV5 VP1 581 to 589 region.

[0329] FIG. 6 is a Circos plot depicting variant AAV5 capsids identified in a primary screen performed as illustrated in FIG. 1. Venn diagrams in the figure are not to scale. Over 1 million variant capsids were identified as unique to cardiac tissue, over 100,000 variants were identified as unique to skeletal muscle tissue, and over 1,000 variants were identified as shared between cardiac tissue and skeletal muscle tissue. The variants identified in cardiac tissue, skeletal muscle tissue, or both cardiac and skeletal muscle tissue exhibited low shared identity with liver (about 0.7% overlap) and other tissues (e.g., non-muscle tissues).

[0330] As shown in FIG. 5, muscle-tropic AAV candidates showed 4-fold to 11-fold enrichment in muscle tissue relative to other non-muscle tissues compared to wild type AAV9. FIG. 5 is a bar graph showing relative accumulation, expressed as log 2 fold change in muscle accumulation relative to other tissues, of variant AAV capsids comprising 581-589 regions of SEQ ID NO: 4318 (CKEWYVRDR), SEQ ID NO: 4960 (CWREFSFQN), SEQ ID NO: 4371 (CVSLHSISM), SEQ ID NO: 3975 (QAHHYNILN), SEQ ID NO: 5215 (CVRTLQSPD), SEQ ID NO: 4598 (LAWSQLLTP), SEQ ID NO: 4359 (CVATKSRML), SEQ ID NO: 5665 (RQTTYDCLD), SEQ ID NO: 257 (CAHYAQWGK), SEQ ID NO: 344 (CSSGFHLFH), SEQ ID NO: 5607 (QCGFIRLNE), SEQ ID NO: 3528 (TVTHMSQHC), SEQ ID NO: 5155 (CVIWYHKYE), SEQ ID NO: 5363 (GCMCIRHAY), SEQ ID NO: 4633 (MACWKNATE), SEQ ID NO: 2525 (QAGSSFHQA), SEQ ID NO: 386 (CYQFWSQYS), SEQ ID NO: 4970 (CINFIMKLG), SEQ ID NO: 5143 (CWRHNIISP), SEQ ID NO: 5178 (CIKWVDIFP), SEQ ID NO: 2505 (PTQFYGPAF), SEQ ID NO: 3709 (VSASFQQHV), SEQ ID NO: 5056 (CVLNYFQFG), SEQ ID NO: 5017 (CFYKIQHKG), SEQ ID NO: 5040 (CVLRMGTFC), SEQ ID NO: 5161 (CTHMMGKSP), SEQ ID NO: 1128 (GFANFMMNF), SEQ ID NO: 2204 (MTMTATTFG), SEQ ID NO: 4316 (CIRHAQDCY), SEQ ID NO: 5463 (KISPWDGFY), SEQ ID NO: 4944 (CWKWQMMFG), SEQ ID NO: 4955 (CVWSQILGG), SEQ ID NO: 4952 (CVILSTRDK), SEQ ID NO: 3260 (SVSPCFCNS), SEQ ID NO: 384 (CYMPFKMQH), SEQ ID NO: 5038 (CVVWPVLGQ), SEQ ID NO: 2371 (NMTMAHQAS), SEQ ID NO: 289 (CIHSVHFAA), SEQ ID NO: 2985 (RVDAFNRGT), SEQ ID NO: 4508 (GSCLKIAQE), SEQ ID NO: 4292 (CAMLLQAVQ), SEQ ID NO: 4995 (CVGYRVHSP), SEQ ID NO: 4949 (CYHQVFSQG), SEQ ID NO: 5077 (CVGSQLHAM), SEQ ID NO: 2370 (NMNTFGKMN), SEQ ID NO: 5193 (CWSHLYFQT), SEQ ID NO: 4568 (KANEDLKQF), SEQ ID NO: 5206 (CFFYPMSMS), SEQ ID NO: 4215 (LYAFYMSSE), SEQ ID NO: 4841 (SSDQYEEMN), SEQ ID NO: 5092 (CISNYLKQG), SEQ ID NO: 4335 (CPMKHIQDR), SEQ ID NO: 5029 (CSFNIHKHT), SEQ ID NO: 3258 (SVRMFDAQY), SEQ ID NO: 4349 (CSSYLVTAN), SEQ ID NO: 348 (CTASWMSWD), or SEQ ID NO: 2729 (QQQQTNFQN). AAV variants that were generated using machine learning (ML) are denoted with arrows. Accumulation was compared to wild type AAV capsids of AAV9, AAV PHP.B, AAV1, AAV2, and AAV5.

### Example 4

### Identification of De Novo Variant 581-589 Regions

[0331] This example describes identification of de novo variant 581-589 regions using machine learning. Machine learning algorithms were trained using AAV5 variants with CNS tissue tropism identified in EXAMPLE 2 or AAV5 variants with muscle tissue tropism identified in EXAMPLE 3.

[0332] Sequences of 581-589 regions that were not identified in the in vivo NHP screen but were predicted by the machine learning analysis to have increased likelihood of either CNS tissue tropism or muscle tropism were generated. After isolating the CNS-specific variants and muscle-specific variants from the in vivo data, novel CNS-specific and muscle-specific sequences were first generated by randomly sampling the amino acid residues at each position of the corresponding population of variants. This created a list of one million variants for each tissue type based on the positional amino acid frequencies observed in the other tissue-specific variants. These one million variants were then tested using random forests classifiers. This calculated a score of predicted tissue-specificity for each variant. The top 300 highest-ranking variants for each tissue type were selected for secondary screening.

[0333] TABLE 3 provides sequences of the top 300 581-589 regions, corresponding to residues 581 to 589 of VP1, for variant AAV VP capsid polypeptides that were predicted to be CNS tissue-tropic. The present disclosure, thus, provides for rAAVs composed of engineered AAV5 VP1 capsid polypeptides having a SEQ ID NO: 2, wherein the X¹ to X⁹ region is any one of SEQ ID NO: 3938-SEQ ID NO: 4237, as disclosed in TABLE 3. Also encompassed herein are rAAVs composed of engineered AAV5 VP2 capsid polypeptides and engineered AAV5 VP3 capsid polypeptides having the sequences disclosed in TABLE 3 at the regions in AAV5 VP2 (amino acid residues 445 to 453) and AAV5 VP3 (amino acid residues 389 to 397) corresponding to the amino acids in the AAV5 VP1 581 to 589 region. FIG. 9 shows the CNS prediction score for CNS targeted candidates identified from multiple non-human primates (NHPs), multiple samples, observational enrichment, frequency enrichment, sequence similarity, or machine learning. CNS targeted candidates generated using machine learning had, on average, higher CNS prediction scores than candidates identified from other sources.

[0334] TABLE 6 provides sequences of the top 300 581-589 regions, corresponding to residues 581 to 589 of VP1, for variant AAV VP capsid polypeptides that were predicted to be muscle-tropic. The present disclosure, thus, provides for rAAVs composed of engineered AAV5 VP1 capsid polypeptides having a SEQ ID NO: 2, wherein the X¹ to X⁹ region is any one of SEQ ID NO: 4934-SEQ ID NO: 5233, as disclosed in TABLE 6. Also encompassed herein are rAAVs composed of engineered AAV5 VP2 capsid polypeptides and engineered AAV5 VP3 capsid polypeptides having the sequences disclosed in TABLE 6 at the regions in AAV5 VP2 (amino acid residues 445 to 453) and AAV5 VP3 (amino acid residues 389 to 397) corresponding to the amino acids in the AAV5 VP1 581 to 589 region. FIG. 8A shows a bar graph of the proportion of candidates from different library sub-sets that were identified as muscle-specific in a secondary screen. Muscle candidates generated using machine learning (“Muscle ML Synthetic”) contained a higher proportion of muscle-specific sequences than candidates identified in muscle in a primary screen (“Muscle Observed”), CNS targeted sequences, or negative control sequences. Muscle candidate sequences generated using machine learning were five times more likely to be heart- and/or skeletal muscle-specific than muscle candidates identified in the primary screen and were 20 times more likely to be heart- and/or skeletal muscle-specific than CNS targeted variants. Candidates were classified as muscle-specific if they were >2-fold enriched in heart and/or skeletal muscle relative to all other tissues and viral input (FDR <0.1, permutations with α-RRA to account for consistency across multiple barcodes for each capsid). FIG. 8B shows a box and whisker plot comparing the predicted probability of muscle specificity from primary screen for candidates that were (“yes”) or were not (“no”) identified as muscle-specific in the secondary screen. Candidates were classified as muscle-specific if they were >2-fold enriched in heart and/or skeletal muscle relative to all other tissues and viral input (FDR <0.1, permutations with α-RRA to account for consistency across multiple barcodes for each capsid).

### Example 5

### Secondary Screen of Recombinant AAV Capsid Candidates with Variant 581-589 Regions

[0335] This example describes a secondary screen of recombinant AAV capsid candidates with variant 581-589 regions. Six thousand AAV capsid variants identified or generated using the methods described in EXAMPLE 1-EXAMPLE 4 were systemically administered to non-human primate. Fifteen wild type spike-in controls representing wild type AAV1, AAV2, AAV5, AAV9, and AAV PHP.B, each at 1×, 10×, and 100× concentrations, along with 100 AAV capsids with stop codons in the 581-589 region, were also administered. Tissue-specific accumulation and tissue-specific transduction of each capsid were evaluated by quantifying capsid DNA and RNA, respectively, in tissues of interest. Barcode sequences for each capsid were extracted from raw sequencing data after filtering based on sequencing quality (Q30) and exact match to the reference library of 48,090 variants representing the 6,000 variant capsid sequences and 15 wild type spike-in controls.

[0336] Enrichment of variant capsids relative to wild type AAVs was quantified for the barcodes associated with each capsid. Enrichment was determined for each capsid for both the RNA and DNA fractions from each of the analyzed tissues, as well as for the input viral library injected into each primate. DNA counts were representative of capsid accumulation, and RNA counts were representative of viral transduction in the tissue. This analysis collectively formed 12 distinct analysis strategies to assess the differential expression of capsids. The different analytical outputs were consolidated into a single z-score to evaluate enrichment of each capsid in a tissue of interest relative to the overall distribution of the capsid differential expression data. The z-score was calculated as follows:

$${Z}_{i} = \frac{{X}_{i} - mean ( X )}{sd ( X )}$$

where Xᵢ is the enrichment of capsid, i, estimated as the median of the log 2(fold change) across capsid barcodes and tissue comparisons. Superior capsid variants were selected based on parameters such as DNA or RNA abundance in a tissue of interest.

### Example 6

### Secondary Screen Results to Identify CNS Tissue-Tropic Recombinant AAV Capsids

[0337] This example describes secondary screen results to identify CNS tissue-tropic recombinant AAV capsids. The secondary screen and enrichment analysis were performed as described in EXAMPLE 5. Recombinant AAV capsids containing variant 581-589 regions that were enriched in CNS tissue and exhibited functional transduction in CNS tissue were identified. TABLE 9 provides enrichment data for the 581-589 region sequences of the top 100 CNS tissue-tropic AAV capsids, as identified in the secondary screen. Superior capsids were selected based on parameters including relative DNA and RNA abundance in CNS tissue, as well as additional metrics shown in TABLE 9, including average of z-score, liver DNA fold change over AAV5, liver RNA fold change over AAV5, liver DNA fold change over AAV9, and liver RNA fold change over AAV9.

TABLE 9
Secondary Screen Results for CNS Tissue-Tropic Capsids

| SEQ ID | DNA FC | RNA FC | DNA FC | RNA FC | DNA FC | RNA FC | Z | Liver DNA | Liver RNA | Liver DNA | Liver RNA |
|---|---|---|---|---|---|---|---|---|---|---|---|
| NO | Input | Input | AAV9 | AAV9 | AAV5 | AAV5 | Ave. | FC AAV5 | FC AAV5 | FC AAV9 | FC AAV9 |
| 18 | 191.25 | 274.64 | 1164.65 | 984.41 | 33.20 | 112.33 | 8.61 | 1.34 | 1.22 | 2.78 | 1.25 |
| 3472 | 101.65 | 174.44 | 619.05 | 625.26 | 17.65 | 71.35 | 6.94 | 1.30 | 0.62 | 2.70 | 0.64 |
| 262 | 74.65 | 175.05 | 454.62 | 627.45 | 12.96 | 71.60 | 6.01 | 2.15 | 1.01 | 4.45 | 1.04 |
| 3306 | 71.12 | 123.11 | 433.11 | 441.25 | 12.35 | 50.35 | 7.54 | 1.08 | 0.49 | 2.24 | 0.51 |
| 2028 | 65.57 | 139.59 | 399.28 | 500.34 | 11.38 | 57.09 | 8.53 | 0.87 | 0.35 | 1.79 | 0.36 |
| 2791 | 64.72 | 112.35 | 394.14 | 402.71 | 11.24 | 45.95 | 6.10 | 0.72 | 1.23 | 1.49 | 1.27 |
| 424 | 61.14 | 110.28 | 372.33 | 395.30 | 10.62 | 45.11 | 8.12 | 0.94 | 0.45 | 1.95 | 0.46 |
| 2536 | 57.12 | 117.60 | 347.86 | 421.52 | 9.92 | 48.10 | 5.71 | 1.04 | 0.24 | 2.16 | 0.25 |
| 1971 | 55.09 | 71.39 | 335.48 | 255.89 | 9.56 | 29.20 | 6.10 | 0.89 | 0.62 | 1.84 | 0.64 |
| 415 | 51.53 | 65.45 | 313.81 | 234.59 | 8.95 | 26.77 | 6.68 | 1.64 | 1.52 | 3.40 | 1.56 |
| 3846 | 48.77 | 1.79 | 297.02 | 6.40 | 8.47 | 0.73 | 2.20 | 1.21 | 0.63 | 2.50 | 0.65 |
| 3283 | 45.30 | 119.98 | 275.88 | 430.06 | 7.87 | 49.07 | 5.43 | 0.89 | 0.29 | 1.84 | 0.30 |
| 1956 | 44.62 | 131.11 | 271.74 | 469.93 | 7.75 | 53.62 | 6.06 | 0.98 | 0.29 | 2.04 | 0.30 |
| 3297 | 37.74 | 40.08 | 229.83 | 143.66 | 6.55 | 16.39 | 4.90 | 1.16 | 0.77 | 2.41 | 0.79 |
| 4545 | 32.45 | 39.08 | 197.63 | 140.07 | 5.63 | 15.98 | 3.50 | 0.98 | 0.43 | 2.03 | 0.45 |
| 2661 | 31.72 | 63.55 | 193.14 | 227.79 | 5.51 | 25.99 | 4.80 | 2.18 | 1.24 | 4.51 | 1.27 |
| 1576 | 29.64 | 62.61 | 180.47 | 224.43 | 5.15 | 25.61 | 3.54 | 1.40 | 0.99 | 2.91 | 1.02 |
| 425 | 27.64 | 57.62 | 168.33 | 206.52 | 4.80 | 23.57 | 5.94 | 0.82 | 0.54 | 1.70 | 0.56 |
| 709 | 26.54 | 118.04 | 161.61 | 423.11 | 4.61 | 48.28 | 6.36 | 0.73 | 1.02 | 1.52 | 1.05 |
| 2168 | 26.46 | 1.72 | 161.14 | 6.17 | 4.59 | 0.70 | −0.67 | 1.53 | 0.90 | 3.18 | 0.93 |
| 54 | 24.61 | 81.85 | 149.88 | 293.39 | 4.27 | 33.48 | 5.50 | 0.78 | 0.89 | 1.61 | 0.92 |
| 429 | 24.47 | 29.17 | 149.03 | 104.55 | 4.25 | 11.93 | 4.44 | 0.78 | 0.53 | 1.62 | 0.55 |
| 708 | 23.66 | 25.56 | 144.07 | 91.62 | 4.11 | 10.45 | 5.65 | 0.61 | 0.64 | 1.26 | 0.66 |
| 428 | 23.48 | 38.00 | 143.01 | 136.19 | 4.08 | 15.54 | 4.76 | 0.86 | 0.75 | 1.79 | 0.77 |
| 4119 | 22.63 | 3.10 | 137.79 | 11.11 | 3.93 | 1.27 | −0.09 | 1.43 | 0.60 | 2.96 | 0.62 |
| 3906 | 22.06 | 10.52 | 134.37 | 37.69 | 3.83 | 4.30 | 3.41 | 1.05 | 0.68 | 2.17 | 0.71 |
| 2456 | 21.87 | 4.38 | 133.18 | 15.72 | 3.80 | 1.79 | 0.68 | 0.93 | 0.14 | 1.92 | 0.15 |
| 2278 | 20.11 | 0.18 | 122.45 | 0.65 | 3.49 | 0.07 | 0.93 | 0.84 | 0.28 | 1.74 | 0.29 |
| 5006 | 19.89 | 3.13 | 121.13 | 11.21 | 3.45 | 1.28 | 0.20 | 1.33 | 0.55 | 2.76 | 0.57 |
| 426 | 19.78 | 27.90 | 120.48 | 100.02 | 3.43 | 11.41 | 3.48 | 0.94 | 0.35 | 1.95 | 0.36 |
| 307 | 18.65 | 19.51 | 113.58 | 69.94 | 3.24 | 7.98 | 2.91 | 1.68 | 0.95 | 3.49 | 0.98 |
| 5155 | 17.70 | 0.18 | 107.81 | 0.63 | 3.07 | 0.07 | −0.76 | 1.17 | 0.99 | 2.42 | 1.02 |
| 2640 | 17.65 | 0.18 | 107.51 | 0.63 | 3.07 | 0.07 | −0.40 | 1.54 | 0.98 | 3.18 | 1.02 |
| 4317 | 17.21 | 25.30 | 104.82 | 90.68 | 2.99 | 10.35 | −0.67 | 1.16 | 1.15 | 2.41 | 1.19 |
| 1145 | 17.18 | 4.79 | 104.62 | 17.18 | 2.98 | 1.96 | 0.24 | 1.11 | 0.43 | 2.29 | 0.44 |
| 430 | 17.08 | 112.52 | 104.03 | 403.32 | 2.97 | 46.02 | 5.26 | 0.85 | 0.20 | 1.76 | 0.20 |
| 885 | 16.85 | 26.78 | 102.60 | 95.98 | 2.93 | 10.95 | 4.49 | 0.80 | 0.41 | 1.65 | 0.43 |
| 23 | 15.09 | 5.08 | 91.89 | 18.22 | 2.62 | 2.08 | 1.65 | 1.57 | 0.79 | 3.25 | 0.82 |
| 103 | 14.93 | 0.37 | 90.91 | 1.33 | 2.59 | 0.15 | 2.04 | 1.02 | 0.24 | 2.11 | 0.25 |
| 22 | 14.24 | 7.55 | 86.72 | 27.06 | 2.47 | 3.09 | 1.16 | 1.76 | 0.90 | 3.65 | 0.93 |
| 4031 | 14.08 | 0.08 | 85.76 | 0.29 | 2.44 | 0.03 | −0.83 | 1.19 | 0.53 | 2.46 | 0.55 |
| 1008 | 13.74 | 0.20 | 83.69 | 0.70 | 2.39 | 0.08 | 0.66 | 1.40 | 1.62 | 2.89 | 1.67 |
| 4790 | 13.33 | 0.07 | 81.15 | 0.24 | 2.31 | 0.03 | −0.16 | 1.34 | 1.38 | 2.78 | 1.43 |
| 2522 | 13.08 | 0.14 | 79.63 | 0.50 | 2.27 | 0.06 | −0.05 | 1.28 | 0.97 | 2.65 | 1.00 |
| 1432 | 13.01 | 2.52 | 79.26 | 9.02 | 2.26 | 1.03 | 2.03 | 0.97 | 0.86 | 2.00 | 0.89 |
| 2914 | 12.99 | 3.03 | 79.13 | 10.84 | 2.26 | 1.24 | −0.48 | 1.44 | 0.54 | 2.99 | 0.56 |
| 3935 | 12.91 | 15.87 | 78.65 | 56.88 | 2.24 | 6.49 | 3.37 | 0.80 | 0.25 | 1.65 | 0.26 |
| 5042 | 12.78 | 0.09 | 77.84 | 0.33 | 2.22 | 0.04 | 0.60 | 0.82 | 0.27 | 1.70 | 0.28 |
| 2865 | 12.37 | 22.18 | 75.33 | 79.48 | 2.15 | 9.07 | 2.54 | 0.94 | 0.51 | 1.95 | 0.53 |
| 4264 | 12.27 | 4.51 | 74.69 | 16.17 | 2.13 | 1.84 | −0.88 | 2.07 | 2.54 | 4.29 | 2.62 |
| 964 | 11.88 | 8.67 | 72.35 | 31.08 | 2.06 | 3.55 | 1.73 | 1.03 | 1.54 | 2.13 | 1.59 |
| 1268 | 11.85 | 22.35 | 72.18 | 80.12 | 2.06 | 9.14 | 3.33 | 0.95 | 0.91 | 1.97 | 0.94 |
| 5065 | 11.85 | 5.41 | 72.16 | 19.38 | 2.06 | 2.21 | −0.20 | 1.06 | 0.81 | 2.21 | 0.84 |
| 706 | 11.55 | 13.76 | 70.31 | 49.31 | 2.00 | 5.63 | 2.86 | 0.78 | 0.31 | 1.61 | 0.32 |
| 4704 | 11.23 | 2.07 | 68.39 | 7.40 | 1.95 | 0.84 | −0.08 | 1.13 | 0.72 | 2.35 | 0.74 |
| 569 | 11.17 | 81.65 | 68.00 | 292.66 | 1.94 | 33.40 | 4.36 | 0.74 | 0.78 | 1.53 | 0.80 |
| 2994 | 11.01 | 0.10 | 67.06 | 0.35 | 1.91 | 0.04 | 0.62 | 2.01 | 1.32 | 4.16 | 1.36 |
| 829 | 10.81 | 0.53 | 65.82 | 1.90 | 1.88 | 0.22 | 0.96 | 0.99 | 0.64 | 2.05 | 0.66 |
| 1171 | 10.78 | 9.90 | 65.68 | 35.48 | 1.87 | 4.05 | 2.66 | 1.09 | 1.09 | 2.26 | 1.13 |
| 1041 | 10.60 | 0.16 | 64.53 | 0.56 | 1.84 | 0.06 | 0.31 | 0.85 | 0.73 | 1.76 | 0.76 |
| 5070 | 10.34 | 3.89 | 62.97 | 13.95 | 1.80 | 1.59 | −0.20 | 1.26 | 0.56 | 2.61 | 0.58 |
| 139 | 10.29 | 3.51 | 62.66 | 12.57 | 1.79 | 1.43 | −0.44 | 0.97 | 0.69 | 2.01 | 0.72 |
| 3304 | 10.15 | 0.12 | 61.81 | 0.44 | 1.76 | 0.05 | −0.20 | 1.30 | 0.92 | 2.70 | 0.95 |
| 2431 | 9.87 | 2.16 | 60.13 | 7.73 | 1.71 | 0.88 | 0.73 | 1.11 | 0.84 | 2.31 | 0.87 |
| 4288 | 9.87 | 14.80 | 60.10 | 53.06 | 1.71 | 6.05 | −1.21 | 1.57 | 1.21 | 3.25 | 1.25 |
| 5795 | 9.85 | 0.24 | 59.96 | 0.86 | 1.71 | 0.10 | 1.01 | 0.91 | 0.56 | 1.89 | 0.58 |
| 1300 | 9.79 | 8.49 | 59.64 | 30.45 | 1.70 | 3.47 | 0.49 | 0.86 | 0.23 | 1.78 | 0.23 |
| 724 | 9.78 | 15.72 | 59.58 | 56.33 | 1.70 | 6.43 | 3.70 | 0.74 | 0.17 | 1.53 | 0.17 |
| 1770 | 9.77 | 0.07 | 59.47 | 0.26 | 1.70 | 0.03 | 0.37 | 1.43 | 0.49 | 2.96 | 0.50 |
| 2830 | 9.63 | 3.28 | 58.63 | 11.77 | 1.67 | 1.34 | 0.44 | 1.26 | 0.91 | 2.60 | 0.94 |
| 1972 | 9.56 | 3.95 | 58.19 | 14.16 | 1.66 | 1.62 | 0.18 | 0.95 | 0.36 | 1.96 | 0.37 |
| 1649 | 9.53 | 0.26 | 58.02 | 0.93 | 1.65 | 0.11 | −0.19 | 1.86 | 2.25 | 3.86 | 2.33 |
| 2515 | 9.50 | 0.05 | 57.88 | 0.20 | 1.65 | 0.02 | 0.42 | 0.76 | 0.87 | 1.58 | 0.89 |
| 2849 | 9.40 | 0.05 | 57.27 | 0.17 | 1.63 | 0.02 | −0.06 | 0.90 | 0.63 | 1.86 | 0.65 |
| 3796 | 9.34 | 0.05 | 56.90 | 0.17 | 1.62 | 0.02 | 0.20 | 1.13 | 0.43 | 2.35 | 0.44 |
| 5815 | 9.33 | 0.42 | 56.83 | 1.50 | 1.62 | 0.17 | −0.48 | 2.37 | 1.72 | 4.90 | 1.78 |
| 118 | 9.27 | 0.33 | 56.48 | 1.19 | 1.61 | 0.14 | 1.79 | 0.99 | 0.23 | 2.05 | 0.24 |
| 4766 | 9.22 | 0.12 | 56.16 | 0.44 | 1.60 | 0.05 | 0.82 | 1.12 | 1.62 | 2.32 | 1.67 |
| 770 | 9.17 | 0.19 | 55.84 | 0.67 | 1.59 | 0.08 | 0.56 | 1.50 | 0.15 | 3.11 | 0.16 |
| 1069 | 9.14 | 7.40 | 55.67 | 26.53 | 1.59 | 3.03 | 2.12 | 1.07 | 2.73 | 2.22 | 2.82 |
| 3061 | 8.90 | 0.36 | 54.18 | 1.29 | 1.54 | 0.15 | 0.67 | 1.17 | 0.42 | 2.41 | 0.43 |
| 4290 | 8.86 | 3.51 | 53.97 | 12.58 | 1.54 | 1.44 | −1.31 | 0.95 | 0.59 | 1.98 | 0.61 |
| 4261 | 8.83 | 0.15 | 53.75 | 0.52 | 1.53 | 0.06 | 0.65 | 0.72 | 0.24 | 1.48 | 0.25 |
| 4239 | 8.78 | 0.47 | 53.44 | 1.68 | 1.52 | 0.19 | 0.00 | 1.11 | 0.72 | 2.31 | 0.75 |
| 3478 | 8.68 | 5.43 | 52.83 | 19.45 | 1.51 | 2.22 | −0.31 | 1.32 | 1.07 | 2.73 | 1.11 |
| 1887 | 8.65 | 39.87 | 52.71 | 142.90 | 1.50 | 16.31 | 3.43 | 1.39 | 0.89 | 2.88 | 0.92 |
| 2671 | 8.57 | 4.68 | 52.17 | 16.79 | 1.49 | 1.92 | 0.67 | 1.06 | 0.60 | 2.19 | 0.62 |
| 256 | 8.38 | 3.78 | 51.03 | 13.55 | 1.45 | 1.55 | −0.26 | 1.33 | 0.59 | 2.76 | 0.61 |
| 1256 | 8.35 | 6.91 | 50.87 | 24.78 | 1.45 | 2.83 | −0.63 | 1.82 | 1.94 | 3.77 | 2.00 |
| 719 | 8.31 | 71.34 | 50.61 | 255.71 | 1.44 | 29.18 | 3.02 | 1.02 | 0.93 | 2.11 | 0.96 |
| 1448 | 8.27 | 0.14 | 50.38 | 0.49 | 1.44 | 0.06 | 0.43 | 0.85 | 0.85 | 1.76 | 0.87 |
| 280 | 8.25 | 4.62 | 50.23 | 16.57 | 1.43 | 1.89 | 0.22 | 1.06 | 0.41 | 2.20 | 0.42 |
| 4338 | 8.21 | 13.98 | 49.98 | 50.11 | 1.42 | 5.72 | −0.64 | 1.17 | 0.68 | 2.43 | 0.71 |
| 5037 | 8.09 | 3.86 | 49.29 | 13.83 | 1.41 | 1.58 | −0.89 | 1.29 | 0.43 | 2.66 | 0.44 |
| 1901 | 8.01 | 0.69 | 48.80 | 2.46 | 1.39 | 0.28 | −0.82 | 1.42 | 1.05 | 2.93 | 1.09 |
| 438 | 7.99 | 6.30 | 48.67 | 22.59 | 1.39 | 2.58 | −0.31 | 1.10 | 0.77 | 2.27 | 0.79 |
| 2834 | 7.96 | 9.98 | 48.50 | 35.77 | 1.38 | 4.08 | 1.10 | 1.98 | 0.92 | 4.09 | 0.95 |
| 5491 | 7.96 | 1.42 | 48.45 | 5.10 | 1.38 | 0.58 | −0.32 | 3.00 | 3.06 | 6.22 | 3.16 |
| 4591 | 7.94 | 11.88 | 48.35 | 42.57 | 1.38 | 4.86 | −0.26 | 1.17 | 0.92 | 2.43 | 0.95 |
| 4936 | 7.94 | 1.98 | 48.33 | 7.08 | 1.38 | 0.81 | −0.42 | 1.23 | 0.91 | 2.54 | 0.94 |

[0338] As shown in TABLE 9, “DNA FC Input” represents the fold change of counts per million (CPM) values, normalized by Trimmed Mean of M-values (TMM) of capsid DNA relative to viral input in CNS tissue. “RNA FC Input” represents the fold change of CPM values (normalized by TMM) of capsid RNA relative to viral input in CNS tissue. “DNA FC AAV9” represents the fold change of CPM values (normalized by TMM and to viral input) of capsid DNA relative to wild-type AAV9 in CNS tissue. “RNA FC AAV9” represents the fold change of CPM values (normalized by TMM and to viral input) of capsid RNA relative to wild-type AAV9 in CNS tissue. “DNA FC AAV5” represents the fold change of CPM values (normalized by TMM and to viral input) of capsid DNA relative to wild-type AAV5 in CNS tissue. “RNA FC AAV5” represents the fold change of CPM values (normalized by TMM and to viral input) of capsid RNA relative to wild-type AAV5 in CNS tissue. “Z. Ave.” represents the average of z-scores calculated from the enrichment values of 12 distinct differential expression analyses comparing the tissue of interest to all other tissues. “Liver DNA FC AAV5” represents the fold change of CPM values (normalized by TMM and to viral input) of capsid DNA relative to wild-type AAV5 in the liver. “Liver RNA FC AAV5” represents the fold change of CPM values (normalized by TMM and to viral input) of capsid RNA relative to wild-type AAV5 in the liver. “Liver DNA FC AAV9” represents the fold change of CPM values (normalized by TMM and to viral input) of capsid DNA relative to wild-type AAV9 in the liver. “Liver RNA FC AAV9” represents the fold change of CPM values (normalized by TMM and to viral input) of capsid RNA relative to wild-type AAV9 in the liver.

[0339] The average Z-score of CNS tissue enrichment for the screened capsid variants, plotted in order of capsid rank, is shown in FIG. 18. High scoring variants corresponding to SEQ ID NO: 18, SEQ ID NO: 2028, SEQ ID NO: 424, SEQ ID NO: 3306, SEQ ID NO: 3472, SEQ ID NO: 415, SEQ ID NO: 709, SEQ ID NO: 1971, SEQ ID NO: 2791, SEQ ID NO: 1956, SEQ ID NO: 262, SEQ ID NO: 425, SEQ ID NO: 2536, SEQ ID NO: 708, SEQ ID NO: 54, SEQ ID NO: 3283, SEQ ID NO: 430, SEQ ID NO: 3297, SEQ ID NO: 2661, SEQ ID NO: 428, SEQ ID NO: 885, SEQ ID NO: 429, SEQ ID NO: 569, SEQ ID NO: 724, SEQ ID NO: 1576, SEQ ID NO: 4545, SEQ ID NO: 426, SEQ ID NO: 1887, SEQ ID NO: 3906, and SEQ ID NO: 3935 are emphasized. The high scoring variant capsid, corresponding to the outlined points in the upper left quadrant, were ranked consistently highly across multiple analysis strategies and ranked consistently higher than wild type AAV5 (wtAAV5) and wild type AAV9 (wtAAV9).

### Example 7

### Secondary Screen Results to Identify Cardiac Tissue-Tropic Recombinant AAV Capsids

[0340] This example describes secondary screen results to identify cardiac tissue-tropic recombinant AAV capsids. The secondary screen and enrichment analysis were performed as described in EXAMPLE 5. Recombinant AAV capsids containing variant 581-589 regions that were enriched in cardiac tissue (including heart tissue and aorta tissue) and exhibited functional transduction in cardiac tissue were identified. TABLE 10 provides enrichment data for the 581-589 region sequences of the top 100 cardiac tissue-tropic AAV capsids, as identified in the secondary screen, and the 15 wild type spike-in controls. Superior capsids were selected based on parameters including relative DNA and RNA abundance in cardiac tissue, as well as additional metrics shown in TABLE 10, including liver DNA fold change over AAV5, liver RNA fold change over AAV5, liver DNA fold change over AAV9, and liver RNA fold change over AAV9.

TABLE 10
Secondary Screen Results for Cardiac Tissue-Tropic Capsids

| | DNA | RNA | DNA | RNA | DNA | RNA | Liver | Liver | Liver |
|---|---|---|---|---|---|---|---|---|---|
| SEQ | FC | FC | FC | FC | FC | FC | DNA FC | RNA FC | DNA FC |
| ID NO | Input | Input | AAV9 | AAV9 | AAV5 | AAV5 | AAV5 | AAV5 | AAV9 |
| 348 | 9.32 | 10.61 | 62.21 | 47.20 | 12.56 | 14.17 | 2.85 | 7.14 | 2.94 |
| 2536 | 7.74 | 2.24 | 51.67 | 9.97 | 10.43 | 2.99 | 0.24 | 2.16 | 0.25 |
| 5607 | 6.03 | 2.46 | 40.23 | 10.95 | 8.12 | 3.29 | 18.66 | 32.87 | 19.25 |
| 1576 | 5.53 | 1.38 | 36.89 | 6.15 | 7.45 | 1.84 | 0.99 | 2.91 | 1.02 |
| 4955 | 5.37 | 2.20 | 35.86 | 9.78 | 7.24 | 2.93 | 0.38 | 2.70 | 0.39 |
| 5017 | 5.22 | 2.68 | 34.87 | 11.94 | 7.04 | 3.58 | 1.94 | 2.76 | 2.00 |
| 4349 | 5.12 | 2.31 | 34.20 | 10.28 | 6.90 | 3.08 | 0.46 | 2.40 | 0.47 |
| 4964 | 4.95 | 2.55 | 33.04 | 11.35 | 6.67 | 3.41 | 1.28 | 3.69 | 1.32 |
| 293 | 4.92 | 4.10 | 32.83 | 18.24 | 6.63 | 5.48 | 0.79 | 3.06 | 0.81 |
| 4314 | 4.78 | 2.66 | 31.91 | 11.83 | 6.44 | 3.55 | 0.49 | 2.21 | 0.50 |
| 4995 | 4.74 | 3.17 | 31.66 | 14.08 | 6.39 | 4.23 | 0.73 | 1.95 | 0.76 |
| 4366 | 4.50 | 1.99 | 30.03 | 8.83 | 6.06 | 2.65 | 1.20 | 2.86 | 1.24 |
| 4961 | 4.47 | 1.64 | 29.86 | 7.30 | 6.03 | 2.19 | 1.02 | 2.25 | 1.05 |
| 4952 | 4.42 | 4.11 | 29.52 | 18.29 | 5.96 | 5.49 | 0.96 | 2.80 | 0.99 |
| 5075 | 4.41 | 3.45 | 29.42 | 15.34 | 5.94 | 4.60 | 1.52 | 2.70 | 1.57 |
| 4354 | 4.40 | 2.03 | 29.39 | 9.02 | 5.93 | 2.71 | 1.91 | 1.81 | 1.97 |
| 5060 | 4.39 | 2.88 | 29.29 | 12.82 | 5.91 | 3.85 | 0.41 | 2.62 | 0.42 |
| 5138 | 4.32 | 5.91 | 28.86 | 26.27 | 5.82 | 7.89 | 0.57 | 2.04 | 0.59 |
| 5206 | 4.27 | 3.04 | 28.50 | 13.53 | 5.75 | 4.06 | 0.63 | 2.58 | 0.65 |
| 4288 | 4.23 | 3.18 | 28.25 | 14.14 | 5.70 | 4.24 | 1.21 | 3.25 | 1.25 |
| 5283 | 4.20 | 2.02 | 28.00 | 8.98 | 5.65 | 2.70 | 5.79 | 11.85 | 5.97 |
| 5092 | 4.18 | 1.66 | 27.89 | 7.39 | 5.63 | 2.22 | 0.36 | 1.88 | 0.37 |
| 4059 | 4.12 | 1.97 | 27.50 | 8.76 | 5.55 | 2.63 | 0.72 | 2.34 | 0.75 |
| 4295 | 4.07 | 2.17 | 27.15 | 9.66 | 5.48 | 2.90 | 1.19 | 2.89 | 1.23 |
| 5030 | 4.04 | 3.17 | 26.99 | 14.08 | 5.45 | 4.23 | 3.24 | 8.80 | 3.34 |
| 4938 | 4.03 | 2.25 | 26.92 | 10.02 | 5.43 | 3.01 | 0.68 | 2.83 | 0.70 |
| 2661 | 4.02 | 1.99 | 26.86 | 8.85 | 5.42 | 2.66 | 1.24 | 4.51 | 1.27 |
| 5215 | 4.02 | 2.68 | 26.82 | 11.94 | 5.41 | 3.58 | 1.53 | 5.08 | 1.58 |
| 4960 | 4.00 | 1.79 | 26.69 | 7.97 | 5.39 | 2.39 | 0.59 | 2.26 | 0.61 |
| 4969 | 3.95 | 1.63 | 26.38 | 7.26 | 5.33 | 2.18 | 0.29 | 2.49 | 0.30 |
| 5023 | 3.93 | 1.43 | 26.22 | 6.36 | 5.29 | 1.91 | 0.46 | 2.39 | 0.48 |
| 4934 | 3.92 | 1.92 | 26.15 | 8.54 | 5.28 | 2.56 | 0.85 | 2.00 | 0.88 |
| 4545 | 3.89 | 1.82 | 26.00 | 8.12 | 5.25 | 2.44 | 0.43 | 2.03 | 0.45 |
| 4963 | 3.89 | 1.47 | 25.95 | 6.53 | 5.24 | 1.96 | 3.75 | 10.01 | 3.87 |
| 4363 | 3.88 | 2.40 | 25.93 | 10.67 | 5.23 | 3.20 | 0.45 | 2.20 | 0.46 |
| 5159 | 3.79 | 2.96 | 25.30 | 13.15 | 5.11 | 3.95 | 1.03 | 2.57 | 1.06 |
| 4973 | 3.77 | 1.86 | 25.17 | 8.28 | 5.08 | 2.48 | 0.59 | 2.63 | 0.61 |
| 5157 | 3.68 | 1.60 | 24.58 | 7.13 | 4.96 | 2.14 | 5.00 | 13.10 | 5.15 |
| 4972 | 3.63 | 1.62 | 24.24 | 7.21 | 4.89 | 2.16 | 0.56 | 2.57 | 0.58 |
| 4345 | 3.63 | 1.68 | 24.21 | 7.46 | 4.89 | 2.24 | 1.11 | 2.15 | 1.14 |
| 5039 | 3.60 | 1.83 | 24.04 | 8.13 | 4.85 | 2.44 | 0.97 | 2.22 | 1.00 |
| 5163 | 3.59 | 4.67 | 23.94 | 20.78 | 4.83 | 6.24 | 0.78 | 2.10 | 0.80 |
| 5040 | 3.57 | 1.27 | 23.86 | 5.64 | 4.81 | 1.69 | 0.94 | 3.36 | 0.96 |
| 4304 | 3.55 | 2.44 | 23.71 | 10.87 | 4.79 | 3.26 | 0.49 | 2.44 | 0.50 |
| 18 | 3.52 | 2.41 | 23.50 | 10.73 | 4.74 | 3.22 | 1.22 | 2.78 | 1.25 |
| 5193 | 3.52 | 6.22 | 23.48 | 27.69 | 4.74 | 8.31 | 1.00 | 2.21 | 1.03 |
| 5077 | 3.51 | 1.71 | 23.42 | 7.59 | 4.73 | 2.28 | 2.91 | 1.91 | 3.01 |
| 5814 | 3.51 | 1.79 | 23.42 | 7.97 | 4.73 | 2.39 | 0.88 | 2.44 | 0.91 |
| 386 | 3.51 | 3.26 | 23.40 | 14.49 | 4.72 | 4.35 | 0.77 | 2.30 | 0.80 |
| 5081 | 3.49 | 1.81 | 23.30 | 8.04 | 4.70 | 2.41 | 0.86 | 2.79 | 0.89 |
| 308 | 3.48 | 1.69 | 23.25 | 7.50 | 4.69 | 2.25 | 0.38 | 2.37 | 0.39 |
| 22 | 3.46 | 1.30 | 23.12 | 5.76 | 4.67 | 1.73 | 0.90 | 3.65 | 0.93 |
| 4338 | 3.42 | 3.00 | 22.83 | 13.34 | 4.61 | 4.00 | 0.68 | 2.43 | 0.71 |
| 3846 | 3.41 | 1.25 | 22.79 | 5.58 | 4.60 | 1.68 | 0.63 | 2.50 | 0.65 |
| 278 | 3.40 | 2.04 | 22.68 | 9.07 | 4.58 | 2.72 | 0.92 | 2.90 | 0.95 |
| 5127 | 3.39 | 1.55 | 22.66 | 6.91 | 4.57 | 2.07 | 0.70 | 2.45 | 0.72 |
| 5029 | 3.39 | 1.80 | 22.62 | 8.00 | 4.57 | 2.40 | 0.42 | 2.51 | 0.43 |
| 5037 | 3.38 | 1.50 | 22.54 | 6.67 | 4.55 | 2.00 | 0.43 | 2.66 | 0.44 |
| 5143 | 3.33 | 1.67 | 22.21 | 7.42 | 4.48 | 2.23 | 1.65 | 3.58 | 1.70 |
| 4983 | 3.31 | 1.90 | 22.09 | 8.46 | 4.46 | 2.54 | 0.60 | 3.28 | 0.62 |
| 4361 | 3.31 | 1.50 | 22.08 | 6.67 | 4.46 | 2.00 | 0.86 | 1.63 | 0.88 |
| 4317 | 3.30 | 3.82 | 22.00 | 17.01 | 4.44 | 5.10 | 1.15 | 2.41 | 1.19 |
| 5080 | 3.27 | 2.62 | 21.80 | 11.67 | 4.40 | 3.50 | 1.05 | 3.25 | 1.09 |
| 23 | 3.26 | 0.85 | 21.76 | 3.78 | 4.39 | 1.14 | 0.79 | 3.25 | 0.82 |
| 4343 | 3.25 | 1.60 | 21.67 | 7.11 | 4.37 | 2.13 | 0.91 | 2.77 | 0.94 |
| 4986 | 3.25 | 3.11 | 21.66 | 13.85 | 4.37 | 4.16 | 0.92 | 1.96 | 0.94 |
| 4311 | 3.24 | 1.76 | 21.65 | 7.85 | 4.37 | 2.36 | 2.50 | 6.05 | 2.58 |
| 5102 | 3.22 | 1.90 | 21.49 | 8.44 | 4.34 | 2.53 | 0.65 | 2.60 | 0.67 |
| 5280 | 3.21 | 3.51 | 21.45 | 15.61 | 4.33 | 4.68 | 2.00 | 6.31 | 2.06 |
| 5185 | 3.19 | 1.80 | 21.32 | 8.00 | 4.30 | 2.40 | 0.47 | 2.63 | 0.49 |
| 964 | 3.18 | 1.42 | 21.26 | 6.33 | 4.29 | 1.90 | 1.54 | 2.13 | 1.59 |
| 4935 | 3.17 | 1.99 | 21.18 | 8.85 | 4.27 | 2.65 | 1.00 | 2.81 | 1.03 |
| 4379 | 3.15 | 2.48 | 21.00 | 11.02 | 4.24 | 3.31 | 0.61 | 1.85 | 0.63 |
| 5052 | 3.13 | 6.63 | 20.92 | 29.49 | 4.22 | 8.85 | 1.14 | 2.00 | 1.17 |
| 5027 | 3.13 | 2.34 | 20.91 | 10.40 | 4.22 | 3.12 | 0.93 | 2.41 | 0.96 |
| 5173 | 3.12 | 1.46 | 20.86 | 6.51 | 4.21 | 1.95 | 2.28 | 5.66 | 2.35 |
| 5055 | 3.12 | 2.16 | 20.81 | 9.61 | 4.20 | 2.88 | 1.05 | 2.09 | 1.08 |
| 5123 | 3.11 | 1.56 | 20.77 | 6.96 | 4.19 | 2.09 | 1.05 | 2.46 | 1.08 |
| 4335 | 3.09 | 1.86 | 20.65 | 8.29 | 4.17 | 2.49 | 1.06 | 2.53 | 1.10 |
| 4936 | 3.09 | 1.58 | 20.64 | 7.03 | 4.17 | 2.11 | 0.91 | 2.54 | 0.94 |
| 5208 | 3.09 | 2.28 | 20.60 | 10.12 | 4.16 | 3.04 | 0.43 | 2.13 | 0.44 |
| 4633 | 3.07 | 1.31 | 20.52 | 5.83 | 4.14 | 1.75 | 0.70 | 1.81 | 0.72 |
| 4359 | 3.06 | 1.64 | 20.42 | 7.30 | 4.12 | 2.19 | 1.00 | 2.44 | 1.03 |
| 289 | 3.05 | 1.43 | 20.39 | 6.35 | 4.11 | 1.90 | 0.60 | 1.93 | 0.62 |
| 4353 | 3.02 | 1.67 | 20.17 | 7.44 | 4.07 | 2.23 | 0.24 | 2.17 | 0.25 |
| 4316 | 3.02 | 1.57 | 20.13 | 7.00 | 4.06 | 2.10 | 0.12 | 1.93 | 0.12 |
| 5210 | 3.01 | 1.56 | 20.12 | 6.95 | 4.06 | 2.09 | 0.99 | 2.26 | 1.02 |
| 4949 | 3.00 | 2.82 | 20.03 | 12.56 | 4.04 | 3.77 | 0.84 | 1.89 | 0.87 |
| 4947 | 2.99 | 1.57 | 19.94 | 7.00 | 4.02 | 2.10 | 0.83 | 2.52 | 0.86 |
| 2838 | 2.98 | 1.35 | 19.87 | 6.01 | 4.01 | 1.80 | 0.69 | 2.52 | 0.71 |
| 378 | 2.97 | 1.75 | 19.81 | 7.77 | 4.00 | 2.33 | 0.57 | 2.70 | 0.58 |
| 5013 | 2.96 | 2.12 | 19.77 | 9.45 | 3.99 | 2.84 | 0.92 | 1.87 | 0.94 |
| 5278 | 2.96 | 1.90 | 19.73 | 8.47 | 3.98 | 2.54 | 0.98 | 3.14 | 1.01 |
| 1471 | 2.95 | 0.98 | 19.71 | 4.37 | 3.98 | 1.31 | 0.86 | 2.15 | 0.89 |
| 4346 | 2.94 | 2.93 | 19.63 | 13.01 | 3.96 | 3.91 | 0.59 | 2.13 | 0.61 |
| 297 | 2.94 | 1.15 | 19.61 | 5.12 | 3.96 | 1.54 | 0.36 | 2.22 | 0.37 |
| 4993 | 2.93 | 1.85 | 19.58 | 8.24 | 3.95 | 2.47 | 0.54 | 2.63 | 0.56 |
| 384 | 2.91 | 1.23 | 19.46 | 5.49 | 3.93 | 1.65 | 1.35 | 3.15 | 1.40 |
| 5062 | 2.91 | 1.51 | 19.41 | 6.73 | 3.92 | 2.02 | 0.94 | 2.22 | 0.96 |
| 4945 | 2.90 | 1.50 | 19.39 | 6.67 | 3.91 | 2.00 | 0.96 | 2.42 | 0.99 |

[0341] As shown in TABLE 10, “DNA FC Input” represents the fold change of counts per million (CPM) values, normalized by Trimmed Mean of M-values (TMM) of capsid DNA relative to viral input in cardiac muscle tissue. “RNA FC Input” represents the fold change of CPM values (normalized by TMM) of capsid RNA relative to viral input in cardiac muscle tissue. “DNA FC AAV9” represents the fold change of CPM values (normalized by TMM and to viral input) of capsid DNA relative to wild-type AAV9 in cardiac muscle tissue. “RNA FC AAV9” represents the fold change of CPM values (normalized by TMM and to viral input) of capsid RNA relative to wild-type AAV9 in cardiac muscle tissue. “DNA FC AAV5” represents the fold change of CPM values (normalized by TMM and to viral input) of capsid DNA relative to wild-type AAV5 in cardiac muscle tissue. “RNA FC AAV5” represents the fold change of CPM values (normalized by TMM and to viral input) of capsid RNA relative to wild-type AAV5 in cardiac muscle tissue. “Liver DNA FC AAV5” represents the fold change of CPM values (normalized by TMM and to viral input) of capsid DNA relative to wild-type AAV5 in the liver. “Liver RNA FC AAV5” represents the fold change of CPM values (normalized by TMM and to viral input) of capsid RNA relative to wild-type AAV5 in the liver. “Liver DNA FC AAV9” represents the fold change of CPM values (normalized by TMM and to viral input) of capsid DNA relative to wild-type AAV9 in the liver. “Liver RNA FC AAV9” represents the fold change of CPM values (normalized by TMM and to viral input) of capsid RNA relative to wild-type AAV9 in the liver.

### Example 8

### Secondary Screen Results to Identify Skeletal Muscle Tissue-Tropic Recombinant AAV Capsids

[0342] This example describes secondary screen results to identify skeletal muscle tissue-tropic recombinant AAV capsids. The secondary screen and enrichment analysis were performed as described in EXAMPLE 5. Recombinant AAV capsids containing variant 581-589 regions that were enriched in skeletal muscle tissue and exhibited functional transduction in skeletal muscle tissue were identified. TABLE 11 provides enrichment data for the 581-589 region sequences of the top 100 skeletal muscle tissue-tropic AAV capsids, as identified in the secondary screen, and the 15 wild type spike-in controls. Superior capsids were selected based on parameters including relative DNA and RNA abundance in skeletal muscle tissue, as well as additional metrics shown in TABLE 11, including liver DNA fold change over AAV5, liver RNA fold change over AAV5, liver DNA fold change over AAV9, and liver RNA fold change over AAV9.

TABLE 11
Secondary Screen Results for Skeletal Muscle Tissue-Tropic Capsids

| | DNA | RNA | DNA | RNA | DNA | RNA | Liver | Liver | Liver |
|---|---|---|---|---|---|---|---|---|---|
| SEQ | FC | FC | FC | FC | FC | FC | DNA FC | RNA FC | DNA FC |
| ID NO | Input | Input | AAV9 | AAV9 | AAV5 | AAV5 | AAV5 | AAV5 | AAV9 |
| 3472 | 7.59 | 29.12 | 34.42 | 48.42 | 8.24 | 4.67 | 0.62 | 2.70 | 0.64 |
| 3297 | 6.62 | 0.29 | 30.01 | 0.49 | 7.18 | 0.05 | 0.77 | 2.41 | 0.79 |
| 2661 | 5.62 | 0.14 | 25.49 | 0.24 | 6.10 | 0.02 | 1.24 | 4.51 | 1.27 |
| 4545 | 5.05 | 0.27 | 22.90 | 0.45 | 5.48 | 0.04 | 0.43 | 2.03 | 0.45 |
| 348 | 4.77 | 0.15 | 21.66 | 0.25 | 5.18 | 0.02 | 2.85 | 7.14 | 2.94 |
| 18 | 4.37 | 0.23 | 19.82 | 0.38 | 4.74 | 0.04 | 1.22 | 2.78 | 1.25 |
| 4349 | 4.18 | 0.14 | 18.97 | 0.23 | 4.54 | 0.02 | 0.46 | 2.40 | 0.47 |
| 293 | 4.15 | 0.55 | 18.81 | 0.91 | 4.50 | 0.09 | 0.79 | 3.06 | 0.81 |
| 5017 | 4.14 | 0.19 | 18.76 | 0.32 | 4.49 | 0.03 | 1.94 | 2.76 | 2.00 |
| 4955 | 4.09 | 0.14 | 18.54 | 0.24 | 4.44 | 0.02 | 0.38 | 2.70 | 0.39 |
| 4366 | 3.80 | 0.23 | 17.24 | 0.39 | 4.13 | 0.04 | 1.20 | 2.86 | 1.24 |
| 5092 | 3.67 | 0.28 | 16.63 | 0.47 | 3.98 | 0.05 | 0.36 | 1.88 | 0.37 |
| 210 | 3.61 | 0.57 | 16.38 | 0.95 | 3.92 | 0.09 | 1.40 | 3.81 | 1.44 |
| 4059 | 3.52 | 0.13 | 15.95 | 0.22 | 3.82 | 0.02 | 0.72 | 2.34 | 0.75 |
| 2536 | 3.49 | 0.23 | 15.85 | 0.37 | 3.80 | 0.04 | 0.24 | 2.16 | 0.25 |
| 5206 | 3.43 | 0.32 | 15.55 | 0.53 | 3.72 | 0.05 | 0.63 | 2.58 | 0.65 |
| 1971 | 3.31 | 0.68 | 15.00 | 1.13 | 3.59 | 0.11 | 0.62 | 1.84 | 0.64 |
| 5607 | 3.26 | 0.32 | 14.79 | 0.54 | 3.54 | 0.05 | 18.66 | 32.87 | 19.25 |
| 262 | 3.24 | 0.24 | 14.70 | 0.40 | 3.52 | 0.04 | 1.01 | 4.45 | 1.04 |
| 4343 | 3.20 | 1.16 | 14.50 | 1.93 | 3.47 | 0.19 | 0.91 | 2.77 | 0.94 |
| 4995 | 3.16 | 0.27 | 14.33 | 0.45 | 3.43 | 0.04 | 0.73 | 1.95 | 0.76 |
| 4009 | 3.12 | 0.56 | 14.15 | 0.93 | 3.39 | 0.09 | 0.71 | 2.51 | 0.74 |
| 5190 | 3.09 | 0.30 | 14.02 | 0.50 | 3.36 | 0.05 | 1.15 | 2.90 | 1.18 |
| 724 | 3.08 | 0.19 | 13.99 | 0.32 | 3.35 | 0.03 | 0.17 | 1.53 | 0.17 |
| 4288 | 3.08 | 0.09 | 13.96 | 0.16 | 3.34 | 0.02 | 1.21 | 3.25 | 1.25 |
| 4973 | 3.07 | 0.79 | 13.94 | 1.31 | 3.34 | 0.13 | 0.59 | 2.63 | 0.61 |
| 4314 | 3.06 | 0.18 | 13.88 | 0.30 | 3.32 | 0.03 | 0.49 | 2.21 | 0.50 |
| 1561 | 3.05 | 0.60 | 13.82 | 1.00 | 3.31 | 0.10 | 1.56 | 3.81 | 1.61 |
| 5147 | 3.01 | 0.15 | 13.68 | 0.25 | 3.27 | 0.02 | 0.54 | 2.71 | 0.56 |
| 4238 | 3.00 | 0.10 | 13.61 | 0.17 | 3.26 | 0.02 | 0.15 | 1.86 | 0.16 |
| 4961 | 2.99 | 0.64 | 13.57 | 1.06 | 3.25 | 0.10 | 1.02 | 2.25 | 1.05 |
| 4964 | 2.97 | 0.23 | 13.49 | 0.39 | 3.23 | 0.04 | 1.28 | 3.69 | 1.32 |
| 5527 | 2.96 | 0.87 | 13.45 | 1.45 | 3.22 | 0.14 | 1.35 | 3.25 | 1.39 |
| 3283 | 2.92 | 23.44 | 13.24 | 38.97 | 3.17 | 3.76 | 0.29 | 1.84 | 0.30 |
| 5075 | 2.86 | 0.12 | 12.97 | 0.20 | 3.11 | 0.02 | 1.52 | 2.70 | 1.57 |
| 4355 | 2.86 | 0.24 | 12.97 | 0.39 | 3.10 | 0.04 | 1.05 | 2.51 | 1.08 |
| 5157 | 2.85 | 0.19 | 12.93 | 0.32 | 3.09 | 0.03 | 5.00 | 13.10 | 5.15 |
| 5159 | 2.85 | 0.33 | 12.92 | 0.54 | 3.09 | 0.05 | 1.03 | 2.57 | 1.06 |
| 4363 | 2.82 | 0.53 | 12.81 | 0.88 | 3.07 | 0.08 | 0.45 | 2.20 | 0.46 |
| 4317 | 2.78 | 0.54 | 12.62 | 0.89 | 3.02 | 0.09 | 1.15 | 2.41 | 1.19 |
| 4963 | 2.77 | 0.18 | 12.58 | 0.30 | 3.01 | 0.03 | 3.75 | 10.01 | 3.87 |
| 5055 | 2.76 | 0.21 | 12.53 | 0.34 | 3.00 | 0.03 | 1.05 | 2.09 | 1.08 |
| 5125 | 2.73 | 0.25 | 12.38 | 0.42 | 2.96 | 0.04 | 0.42 | 2.88 | 0.43 |
| 4108 | 2.72 | 0.43 | 12.33 | 0.71 | 2.95 | 0.07 | 0.89 | 3.87 | 0.92 |
| 308 | 2.69 | 0.60 | 12.22 | 1.00 | 2.92 | 0.10 | 0.38 | 2.37 | 0.39 |
| 4311 | 2.68 | 0.14 | 12.17 | 0.23 | 2.91 | 0.02 | 2.50 | 6.05 | 2.58 |
| 5060 | 2.66 | 0.39 | 12.06 | 0.64 | 2.89 | 0.06 | 0.41 | 2.62 | 0.42 |
| 2948 | 2.65 | 0.55 | 12.01 | 0.91 | 2.88 | 0.09 | 1.46 | 4.76 | 1.51 |
| 3821 | 2.65 | 0.36 | 12.00 | 0.60 | 2.87 | 0.06 | 1.08 | 2.52 | 1.12 |
| 5138 | 2.64 | 422.81 | 11.96 | 702.96 | 2.86 | 67.77 | 0.57 | 2.04 | 0.59 |
| 4354 | 2.64 | 0.33 | 11.96 | 0.54 | 2.86 | 0.05 | 1.91 | 1.81 | 1.97 |
| 4353 | 2.63 | 0.37 | 11.93 | 0.62 | 2.86 | 0.06 | 0.24 | 2.17 | 0.25 |
| 5030 | 2.62 | 0.09 | 11.88 | 0.15 | 2.84 | 0.01 | 3.24 | 8.80 | 3.34 |
| 4346 | 2.59 | 0.27 | 11.77 | 0.46 | 2.82 | 0.04 | 0.59 | 2.13 | 0.61 |
| 5283 | 2.57 | 0.09 | 11.65 | 0.15 | 2.79 | 0.01 | 5.79 | 11.85 | 5.97 |
| 4632 | 2.55 | 0.19 | 11.55 | 0.32 | 2.76 | 0.03 | 0.57 | 2.33 | 0.59 |
| 294 | 2.53 | 0.38 | 11.48 | 0.63 | 2.75 | 0.06 | 0.92 | 1.86 | 0.95 |
| 386 | 2.50 | 0.20 | 11.35 | 0.33 | 2.72 | 0.03 | 0.77 | 2.30 | 0.80 |
| 4943 | 2.49 | 0.35 | 11.31 | 0.59 | 2.71 | 0.06 | 0.51 | 2.85 | 0.52 |
| 1391 | 2.49 | 2.22 | 11.31 | 3.70 | 2.71 | 0.36 | 0.58 | 3.88 | 0.60 |
| 5078 | 2.48 | 0.43 | 11.26 | 0.71 | 2.69 | 0.07 | 0.79 | 2.10 | 0.81 |
| 3299 | 2.48 | 0.87 | 11.26 | 1.44 | 2.69 | 0.14 | 0.34 | 2.91 | 0.35 |
| 2897 | 2.47 | 0.55 | 11.21 | 0.92 | 2.68 | 0.09 | 1.23 | 3.90 | 1.27 |
| 1537 | 2.46 | 1.24 | 11.16 | 2.06 | 2.67 | 0.20 | 0.40 | 3.00 | 0.41 |
| 5255 | 2.46 | 0.36 | 11.15 | 0.60 | 2.67 | 0.06 | 1.68 | 4.90 | 1.73 |
| 141 | 2.45 | 0.63 | 11.14 | 1.04 | 2.67 | 0.10 | 1.27 | 3.85 | 1.31 |
| 4345 | 2.45 | 0.12 | 11.12 | 0.19 | 2.66 | 0.02 | 1.11 | 2.15 | 1.14 |
| 5038 | 2.44 | 0.43 | 11.06 | 0.72 | 2.65 | 0.07 | 0.45 | 2.31 | 0.47 |
| 5153 | 2.44 | 0.17 | 11.06 | 0.29 | 2.65 | 0.03 | 0.63 | 3.87 | 0.65 |
| 1181 | 2.43 | 0.54 | 11.03 | 0.90 | 2.64 | 0.09 | 0.57 | 3.51 | 0.58 |
| 307 | 2.42 | 0.20 | 10.98 | 0.33 | 2.63 | 0.03 | 0.95 | 3.49 | 0.98 |
| 5039 | 2.42 | 0.19 | 10.98 | 0.31 | 2.63 | 0.03 | 0.97 | 2.22 | 1.00 |
| 1204 | 2.41 | 0.37 | 10.92 | 0.61 | 2.61 | 0.06 | 1.13 | 2.72 | 1.16 |
| 4404 | 2.41 | 0.22 | 10.92 | 0.36 | 2.61 | 0.04 | 0.25 | 1.64 | 0.26 |
| 5106 | 2.40 | 0.28 | 10.89 | 0.47 | 2.61 | 0.04 | 0.59 | 2.31 | 0.60 |
| 2779 | 2.40 | 0.51 | 10.89 | 0.85 | 2.61 | 0.08 | 1.56 | 4.50 | 1.61 |
| 4952 | 2.40 | 0.09 | 10.89 | 0.15 | 2.61 | 0.01 | 0.96 | 2.80 | 0.99 |
| 278 | 2.40 | 6.97 | 10.87 | 11.60 | 2.60 | 1.12 | 0.92 | 2.90 | 0.95 |
| 1824 | 2.40 | 1.12 | 10.87 | 1.86 | 2.60 | 0.18 | 1.76 | 5.93 | 1.82 |
| 5116 | 2.39 | 0.23 | 10.83 | 0.39 | 2.59 | 0.04 | 0.48 | 2.64 | 0.49 |
| 4304 | 2.37 | 0.16 | 10.75 | 0.26 | 2.57 | 0.02 | 0.49 | 2.44 | 0.50 |
| 4295 | 2.36 | 0.06 | 10.73 | 0.09 | 2.57 | 0.01 | 1.19 | 2.89 | 1.23 |
| 3179 | 2.36 | 0.41 | 10.69 | 0.68 | 2.56 | 0.07 | 0.82 | 2.94 | 0.85 |
| 3306 | 2.34 | 0.48 | 10.64 | 0.80 | 2.55 | 0.08 | 0.49 | 2.24 | 0.51 |
| 98 | 2.34 | 0.46 | 10.64 | 0.76 | 2.55 | 0.07 | 1.50 | 3.46 | 1.54 |
| 1872 | 2.34 | 0.50 | 10.63 | 0.84 | 2.55 | 0.08 | 0.54 | 2.47 | 0.56 |
| 5037 | 2.34 | 0.26 | 10.62 | 0.43 | 2.54 | 0.04 | 0.43 | 2.66 | 0.44 |
| 1268 | 2.34 | 0.81 | 10.60 | 1.35 | 2.54 | 0.13 | 0.91 | 1.97 | 0.94 |
| 1634 | 2.34 | 2.46 | 10.60 | 4.09 | 2.54 | 0.39 | 1.55 | 3.50 | 1.60 |
| 1060 | 2.33 | 0.23 | 10.57 | 0.38 | 2.53 | 0.04 | 1.55 | 2.63 | 1.59 |
| 4941 | 2.33 | 0.27 | 10.55 | 0.44 | 2.53 | 0.04 | 1.00 | 3.40 | 1.04 |
| 4361 | 2.32 | 0.27 | 10.53 | 0.44 | 2.52 | 0.04 | 0.86 | 1.63 | 0.88 |
| 4981 | 2.31 | 0.37 | 10.49 | 0.61 | 2.51 | 0.06 | 1.97 | 4.47 | 2.03 |
| 4359 | 2.31 | 0.22 | 10.47 | 0.37 | 2.51 | 0.04 | 1.00 | 2.44 | 1.03 |
| 5274 | 2.31 | 0.09 | 10.47 | 0.15 | 2.51 | 0.01 | 2.68 | 5.94 | 2.76 |
| 5816 | 2.30 | 0.80 | 10.44 | 1.33 | 2.50 | 0.13 | 2.09 | 5.41 | 2.16 |
| 2842 | 2.30 | 0.28 | 10.44 | 0.47 | 2.50 | 0.05 | 0.63 | 2.36 | 0.65 |
| 1934 | 2.30 | 28.74 | 10.43 | 47.78 | 2.50 | 4.61 | 1.26 | 2.95 | 1.30 |
| 5817 | 2.30 | 10.17 | 10.43 | 16.91 | 2.50 | 1.63 | 2.49 | 5.43 | 2.57 |
| 3998 | 2.29 | 0.66 | 10.41 | 1.10 | 2.49 | 0.11 | 2.54 | 5.64 | 2.62 |

[0343] As shown in TABLE 11, “DNA FC Input” represents the fold change of counts per million (CPM) values, normalized by Trimmed Mean of M-values (TMM) of capsid DNA relative to viral input in skeletal muscle tissue. “RNA FC Input” represents the fold change of CPM values (normalized by TMMN/) of capsid RNA relative to viral input in skeletal muscle tissue. “DNA FC AAV9” represents the fold change of CPM values (normalized by TMM and to viral input) of capsid DNA relative to wild-type AAV9 in skeletal muscle tissue. “RNA FC AAV9” represents the fold change of CPM values (normalized by TMM and to viral input) of capsid RNA relative to wild-type AAV9 in skeletal muscle tissue. “DNA FC AAV5” represents the fold change of CPM values (normalized by TMVM and to viral input) of capsid DNA relative to wild-type AAV5 in skeletal muscle tissue. “RNA FC AAV5” represents the fold change of CPM values (normalized by TMMN and to viral input) of capsid RNA relative to wild-type AAV5 in skeletal muscle tissue. “Liver DNA FC AAV5” represents the fold change of CPM values (normalized by TMMN and to viral input) of capsid DNA relative to wild-type AAV5 in the liver. “Liver RNA FC AAV5” represents the fold change of CPM values (normalized by TMMN and to viral input) of capsid RNA relative to wild-type AAV5 in the liver. “Liver DNA FC AAV9” represents the fold change of CPM values (normalized by TMM and to viral input) of capsid DNA relative to wild-type AAV9 in the liver. “Liver RNA FC AAV9” represents the fold change of CPM values (normalized by TMM and to viral input) of capsid RNA relative to wild-type AAV9 in the liver.

### Example 9

### Secondary Screen Results to Identify Muscle Tissue-Tropic Recombinant AAV Capsids

[0344] This example describes secondary screen results to identify muscle tissue-tropic recombinant AAV capsids. The secondary screen and enrichment analysis were performed as described in EXAMPLE 5. Recombinant AAV capsids containing variant 581-589 regions that were enriched in muscle tissue (including cardiac tissue and skeletal muscle tissue) and exhibited functional transduction in muscle tissue were identified. TABLE 12 provides enrichment data for the 581-589 region sequences of the top 100 muscle tissue-tropic AAV capsids, as identified in the secondary screen, and the 15 wild type spike-in controls. Superior capsids were selected based on parameters including relative DNA and RNA abundance in muscle tissue, as well as additional metrics shown in TABLE 12, including liver DNA fold change over AAV5, liver RNA fold change over AAV5, liver DNA fold change over AAV9, and liver RNA fold change over AAV9.

TABLE 12
Secondary Screen Results for Muscle Tissue-Tropic Capsids

| | DNA | RNA | DNA | RNA | DNA | RNA | Liver | Liver | Liver |
|---|---|---|---|---|---|---|---|---|---|
| SEQ | FC | FC | FC | FC | FC | FC | DNA FC | RNA FC | DNA FC |
| ID NO | Input | Input | AAV9 | AAV9 | AAV5 | AAV5 | AAV5 | AAV5 | AAV9 |
| 348 | 8.14 | 7.62 | 48.43 | 22.93 | 10.32 | 3.29 | 2.85 | 7.14 | 2.94 |
| 2536 | 6.64 | 1.67 | 39.50 | 5.01 | 8.42 | 0.72 | 0.24 | 2.16 | 0.25 |
| 5607 | 5.31 | 1.85 | 31.58 | 5.57 | 6.73 | 0.80 | 18.66 | 32.87 | 19.25 |
| 4955 | 5.04 | 1.61 | 29.97 | 4.85 | 6.39 | 0.70 | 0.38 | 2.70 | 0.39 |
| 5017 | 4.94 | 1.97 | 29.39 | 5.93 | 6.27 | 0.85 | 1.94 | 2.76 | 2.00 |
| 4349 | 4.88 | 1.69 | 29.02 | 5.08 | 6.19 | 0.73 | 0.46 | 2.40 | 0.47 |
| 293 | 4.72 | 3.09 | 28.06 | 9.28 | 5.98 | 1.33 | 0.79 | 3.06 | 0.81 |
| 1576 | 4.62 | 1.14 | 27.51 | 3.43 | 5.86 | 0.49 | 0.99 | 2.91 | 1.02 |
| 2661 | 4.44 | 1.46 | 26.39 | 4.40 | 5.63 | 0.63 | 1.24 | 4.51 | 1.27 |
| 4964 | 4.44 | 1.89 | 26.39 | 5.68 | 5.63 | 0.82 | 1.28 | 3.69 | 1.32 |
| 4314 | 4.33 | 1.95 | 25.78 | 5.87 | 5.50 | 0.84 | 0.49 | 2.21 | 0.50 |
| 4995 | 4.33 | 2.34 | 25.77 | 7.04 | 5.49 | 1.01 | 0.73 | 1.95 | 0.76 |
| 4366 | 4.32 | 1.48 | 25.68 | 4.47 | 5.48 | 0.64 | 1.20 | 2.86 | 1.24 |
| 4545 | 4.19 | 1.38 | 24.94 | 4.16 | 5.32 | 0.60 | 0.43 | 2.03 | 0.45 |
| 4961 | 4.09 | 1.35 | 24.32 | 4.07 | 5.19 | 0.58 | 1.02 | 2.25 | 1.05 |
| 5206 | 4.05 | 2.26 | 24.10 | 6.81 | 5.14 | 0.98 | 0.63 | 2.58 | 0.65 |
| 5092 | 4.04 | 1.27 | 24.06 | 3.81 | 5.13 | 0.55 | 0.36 | 1.88 | 0.37 |
| 3472 | 4.03 | 9.18 | 23.96 | 27.61 | 5.11 | 3.96 | 0.62 | 2.70 | 0.64 |
| 5075 | 4.01 | 2.50 | 23.83 | 7.51 | 5.08 | 1.08 | 1.52 | 2.70 | 1.57 |
| 4059 | 3.96 | 1.44 | 23.57 | 4.35 | 5.03 | 0.62 | 0.72 | 2.34 | 0.75 |
| 4354 | 3.94 | 1.54 | 23.46 | 4.64 | 5.00 | 0.67 | 1.91 | 1.81 | 1.97 |
| 5060 | 3.94 | 2.17 | 23.43 | 6.53 | 5.00 | 0.94 | 0.41 | 2.62 | 0.42 |
| 4288 | 3.93 | 2.30 | 23.39 | 6.91 | 4.99 | 0.99 | 1.21 | 3.25 | 1.25 |
| 4952 | 3.90 | 2.96 | 23.19 | 8.91 | 4.94 | 1.28 | 0.96 | 2.80 | 0.99 |
| 5138 | 3.89 | 125.02 | 23.11 | 376.10 | 4.93 | 53.95 | 0.57 | 2.04 | 0.59 |
| 5283 | 3.77 | 1.47 | 22.45 | 4.41 | 4.79 | 0.63 | 5.79 | 11.85 | 5.97 |
| 18 | 3.74 | 1.79 | 22.25 | 5.38 | 4.74 | 0.77 | 1.22 | 2.78 | 1.25 |
| 5030 | 3.67 | 2.29 | 21.85 | 6.88 | 4.66 | 0.99 | 3.24 | 8.80 | 3.34 |
| 3297 | 3.67 | 1.54 | 21.84 | 4.63 | 4.66 | 0.66 | 0.77 | 2.41 | 0.79 |
| 4295 | 3.63 | 1.57 | 21.57 | 4.72 | 4.60 | 0.68 | 1.19 | 2.89 | 1.23 |
| 4363 | 3.61 | 1.86 | 21.47 | 5.61 | 4.58 | 0.80 | 0.45 | 2.20 | 0.46 |
| 4963 | 3.60 | 1.10 | 21.41 | 3.31 | 4.56 | 0.47 | 3.75 | 10.01 | 3.87 |
| 4973 | 3.59 | 1.55 | 21.35 | 4.67 | 4.55 | 0.67 | 0.59 | 2.63 | 0.61 |
| 5159 | 3.55 | 2.21 | 21.09 | 6.63 | 4.50 | 0.95 | 1.03 | 2.57 | 1.06 |
| 4960 | 3.50 | 1.50 | 20.83 | 4.52 | 4.44 | 0.65 | 0.59 | 2.26 | 0.61 |
| 4938 | 3.47 | 1.67 | 20.63 | 5.03 | 4.40 | 0.72 | 0.68 | 2.83 | 0.70 |
| 5157 | 3.47 | 1.20 | 20.62 | 3.61 | 4.40 | 0.52 | 5.00 | 13.10 | 5.15 |
| 5023 | 3.45 | 1.06 | 20.55 | 3.18 | 4.38 | 0.46 | 0.46 | 2.39 | 0.48 |
| 4969 | 3.40 | 1.20 | 20.21 | 3.61 | 4.31 | 0.52 | 0.29 | 2.49 | 0.30 |
| 5215 | 3.34 | 2.05 | 19.84 | 6.17 | 4.23 | 0.88 | 1.53 | 5.08 | 1.58 |
| 4345 | 3.32 | 1.23 | 19.76 | 3.70 | 4.21 | 0.53 | 1.11 | 2.15 | 1.14 |
| 5039 | 3.29 | 1.36 | 19.60 | 4.09 | 4.18 | 0.59 | 0.97 | 2.22 | 1.00 |
| 308 | 3.28 | 1.38 | 19.50 | 4.14 | 4.16 | 0.59 | 0.38 | 2.37 | 0.39 |
| 4304 | 3.25 | 1.79 | 19.31 | 5.38 | 4.12 | 0.77 | 0.49 | 2.44 | 0.50 |
| 386 | 3.25 | 2.38 | 19.30 | 7.17 | 4.12 | 1.03 | 0.77 | 2.30 | 0.80 |
| 4934 | 3.24 | 1.46 | 19.29 | 4.41 | 4.11 | 0.63 | 0.85 | 2.00 | 0.88 |
| 4343 | 3.23 | 1.47 | 19.23 | 4.43 | 4.10 | 0.64 | 0.91 | 2.77 | 0.94 |
| 5163 | 3.22 | 3.36 | 19.14 | 10.11 | 4.08 | 1.45 | 0.78 | 2.10 | 0.80 |
| 5081 | 3.17 | 1.40 | 18.86 | 4.22 | 4.02 | 0.61 | 0.86 | 2.79 | 0.89 |
| 4317 | 3.16 | 2.88 | 18.81 | 8.68 | 4.01 | 1.24 | 1.15 | 2.41 | 1.19 |
| 5814 | 3.15 | 1.40 | 18.72 | 4.23 | 3.99 | 0.61 | 0.88 | 2.44 | 0.91 |
| 278 | 3.14 | 3.45 | 18.66 | 10.37 | 3.98 | 1.49 | 0.92 | 2.90 | 0.95 |
| 5040 | 3.12 | 0.95 | 18.55 | 2.85 | 3.95 | 0.41 | 0.94 | 3.36 | 0.96 |
| 4972 | 3.11 | 1.47 | 18.50 | 4.41 | 3.94 | 0.63 | 0.56 | 2.57 | 0.58 |
| 5037 | 3.11 | 1.15 | 18.48 | 3.45 | 3.94 | 0.49 | 0.43 | 2.66 | 0.44 |
| 4311 | 3.10 | 1.30 | 18.43 | 3.91 | 3.93 | 0.56 | 2.50 | 6.05 | 2.58 |
| 5127 | 3.08 | 1.18 | 18.33 | 3.56 | 3.91 | 0.51 | 0.70 | 2.45 | 0.72 |
| 5193 | 3.07 | 4.58 | 18.28 | 13.79 | 3.90 | 1.98 | 1.00 | 2.21 | 1.03 |
| 4361 | 3.05 | 1.15 | 18.15 | 3.45 | 3.87 | 0.50 | 0.86 | 1.63 | 0.88 |
| 5077 | 3.04 | 1.24 | 18.11 | 3.73 | 3.86 | 0.54 | 2.91 | 1.91 | 3.01 |
| 5029 | 3.03 | 1.35 | 18.04 | 4.05 | 3.85 | 0.58 | 0.42 | 2.51 | 0.43 |
| 5055 | 3.03 | 1.60 | 18.00 | 4.82 | 3.84 | 0.69 | 1.05 | 2.09 | 1.08 |
| 5143 | 3.01 | 1.23 | 17.88 | 3.69 | 3.81 | 0.53 | 1.65 | 3.58 | 1.70 |
| 5080 | 2.98 | 1.91 | 17.72 | 5.74 | 3.78 | 0.82 | 1.05 | 3.25 | 1.09 |
| 4983 | 2.94 | 1.48 | 17.51 | 4.46 | 3.73 | 0.64 | 0.60 | 3.28 | 0.62 |
| 5190 | 2.93 | 1.19 | 17.45 | 3.59 | 3.72 | 0.51 | 1.15 | 2.90 | 1.18 |
| 4353 | 2.92 | 1.30 | 17.37 | 3.91 | 3.70 | 0.56 | 0.24 | 2.17 | 0.25 |
| 4338 | 2.92 | 2.18 | 17.35 | 6.56 | 3.70 | 0.94 | 0.68 | 2.43 | 0.71 |
| 4379 | 2.91 | 1.81 | 17.32 | 5.44 | 3.69 | 0.78 | 0.61 | 1.85 | 0.63 |
| 5173 | 2.89 | 1.10 | 17.19 | 3.32 | 3.66 | 0.48 | 2.28 | 5.66 | 2.35 |
| 5052 | 2.88 | 4.80 | 17.12 | 14.43 | 3.65 | 2.07 | 1.14 | 2.00 | 1.17 |
| 3846 | 2.87 | 0.98 | 17.09 | 2.94 | 3.64 | 0.42 | 0.63 | 2.50 | 0.65 |
| 4986 | 2.87 | 2.35 | 17.07 | 7.07 | 3.64 | 1.01 | 0.92 | 1.96 | 0.94 |
| 4935 | 2.87 | 1.47 | 17.06 | 4.42 | 3.64 | 0.63 | 1.00 | 2.81 | 1.03 |
| 4359 | 2.86 | 1.24 | 17.04 | 3.72 | 3.63 | 0.53 | 1.00 | 2.44 | 1.03 |
| 4346 | 2.85 | 2.17 | 16.96 | 6.52 | 3.62 | 0.94 | 0.59 | 2.13 | 0.61 |
| 262 | 2.85 | 0.84 | 16.95 | 2.53 | 3.61 | 0.36 | 1.01 | 4.45 | 1.04 |
| 289 | 2.83 | 1.16 | 16.84 | 3.50 | 3.59 | 0.50 | 0.60 | 1.93 | 0.62 |
| 22 | 2.82 | 1.05 | 16.79 | 3.16 | 3.58 | 0.45 | 0.90 | 3.65 | 0.93 |
| 5280 | 2.82 | 2.53 | 16.75 | 7.61 | 3.57 | 1.09 | 2.00 | 6.31 | 2.06 |
| 5210 | 2.82 | 1.27 | 16.75 | 3.82 | 3.57 | 0.55 | 0.99 | 2.26 | 1.02 |
| 5027 | 2.81 | 1.80 | 16.73 | 5.41 | 3.57 | 0.78 | 0.93 | 2.41 | 0.96 |
| 5185 | 2.80 | 1.33 | 16.66 | 3.99 | 3.55 | 0.57 | 0.47 | 2.63 | 0.49 |
| 4009 | 2.79 | 1.18 | 16.59 | 3.56 | 3.54 | 0.51 | 0.71 | 2.51 | 0.74 |
| 5102 | 2.78 | 1.42 | 16.54 | 4.26 | 3.53 | 0.61 | 0.65 | 2.60 | 0.67 |
| 5123 | 2.78 | 1.25 | 16.53 | 3.75 | 3.52 | 0.54 | 1.05 | 2.46 | 1.08 |
| 294 | 2.77 | 1.07 | 16.47 | 3.21 | 3.51 | 0.46 | 0.92 | 1.86 | 0.95 |
| 4949 | 2.76 | 2.20 | 16.42 | 6.62 | 3.50 | 0.95 | 0.84 | 1.89 | 0.87 |
| 5208 | 2.75 | 1.66 | 16.34 | 4.99 | 3.48 | 0.72 | 0.43 | 2.13 | 0.44 |
| 4633 | 2.75 | 0.97 | 16.33 | 2.93 | 3.48 | 0.42 | 0.70 | 1.81 | 0.72 |
| 4238 | 2.74 | 1.01 | 16.31 | 3.05 | 3.48 | 0.44 | 0.15 | 1.86 | 0.16 |
| 5026 | 2.70 | 4.30 | 16.07 | 12.94 | 3.43 | 1.86 | 1.22 | 3.16 | 1.26 |
| 23 | 2.70 | 0.84 | 16.04 | 2.52 | 3.42 | 0.36 | 0.79 | 3.25 | 0.82 |
| 378 | 2.69 | 1.40 | 16.03 | 4.22 | 3.42 | 0.61 | 0.57 | 2.70 | 0.58 |
| 4316 | 2.68 | 1.17 | 15.93 | 3.51 | 3.40 | 0.50 | 0.12 | 1.93 | 0.12 |
| 964 | 2.66 | 1.29 | 15.83 | 3.89 | 3.38 | 0.56 | 1.54 | 2.13 | 1.59 |
| 5062 | 2.66 | 1.14 | 15.83 | 3.43 | 3.37 | 0.49 | 0.94 | 2.22 | 0.96 |
| 4290 | 2.65 | 1.22 | 15.74 | 3.68 | 3.35 | 0.53 | 0.59 | 1.98 | 0.61 |
| 4943 | 2.64 | 3.00 | 15.68 | 9.04 | 3.34 | 1.30 | 0.51 | 2.85 | 0.52 |
| 4947 | 2.63 | 1.25 | 15.62 | 3.75 | 3.33 | 0.54 | 0.83 | 2.52 | 0.86 |

[0345] As shown in TABLE 12, “DNA FC Input” represents the fold change of counts per million (CPM) values, normalized by Trimmed Mean of M-values (TMM) of capsid DNA relative to viral input in muscle tissue. “RNA FC Input” represents the fold change of CPM values (normalized by TMM) of capsid RNA relative to viral input in muscle tissue. “DNA FC AAV9” represents the fold change of CPM values (normalized by TMM and to viral input) of capsid DNA relative to wild-type AAV9 in muscle tissue. “RNA FC AAV9” represents the fold change of CPM values (normalized by TMM and to viral input) of capsid RNA relative to wild-type AAV9 in muscle tissue. “DNA FC AAV5” represents the fold change of CPM values (normalized by TMM and to viral input) of capsid DNA relative to wild-type AAV5 in muscle tissue. “RNA FC AAV5” represents the fold change of CPM values (normalized by TMM and to viral input) of capsid RNA relative to wild-type AAV5 in muscle tissue. “Liver DNA FC AAV5” represents the fold change of CPM values (normalized by TMM and to viral input) of capsid DNA relative to wild-type AAV5 in the liver. “Liver RNA FC AAV5” represents the fold change of CPM values (normalized by TMM and to viral input) of capsid RNA relative to wild-type AAV5 in the liver. “Liver DNA FC AAV9” represents the fold change of CPM values (normalized by TMM and to viral input) of capsid DNA relative to wild-type AAV9 in the liver. “Liver RNA FC AAV9” represents the fold change of CPM values (normalized by TMM and to viral input) of capsid RNA relative to wild-type AAV9 in the liver.

### Example 10

### Screening of AAV5 Capsid Variants in Mice

[0346] This example describes screening of recombinant AAV capsid candidates with variant 581-589 regions in mice. The goal of this screen was to identify capsid candidates with corresponding tissue specificity in both mice and non-human primates (NHPs) for use as a research tool in mice. The 6,000 AAV capsid variants library using the methods described and administered to NHPs in EXAMPLE 5 was administered to mice. Fifteen wild type spike-in controls representing wild type AAV1, AAV2, AAV5, AAV9, and AAV PHP.B, each at 1×, 10×, and 100× concentrations, along with 100 AAV capsids with stop codons in the 581-589 region, were also administered. Tissue-specific accumulation of each capsid was evaluated by quantifying capsid DNA in heart and CNS tissues. Barcode sequences for each capsid were extracted from raw sequencing data after filtering based on sequencing quality (Q30) and exact match to the reference library of 48,090 variants representing the 6,000 variant capsid sequences and 15 wild type spike-in controls.

[0347] Enrichment of variant capsids relative to wild type AAVs was quantified for the barcodes associated with each capsid. Enrichment was determined for each capsid for the DNA fraction from each of the analyzed tissues, as well as for the input viral library injected into each primate and mouse. DNA counts were representative of capsid accumulation

[0348] From the secondary screen, 17 capsid variants were identified that exhibited cardiac muscle tissue tropism in both NHPs and in mice. Quantification of cardiac muscle tissue tropism for these 17 variants is provided in TABLE 13. As shown in TABLE 13, capsid variants having 581-589 region sequences of SEQ ID NO: 5027, SEQ ID NO: 4633, SEQ ID NO: 4943, SEQ TD NO: 386, SEQ ID NO: 334, SEQ ID NO: 4309, SEQ ID NO: 4288, SEQ ID NO: 4964, SEQ TD NO: 5017, SEQ ID NO: 5814 SEQ ID NO: 4335, SEQ ID NO:348, SEQ ID NO: 4936, SEQ TD NO: 5206, SEQ ID NO: 4238, SEQ ID NO: 5077, and SEQ ID NO: 5603 were enriched in heart tissue in both NUPs and mice. Additionally, the enrichment of these 17 variants was well correlated between NUPs and mice, as indicated by the median log 2 fold change calculated from the differential expression analysis comparing cardiac tissue to all other tissues. Rho values represent the likelihood that enrichment occurred by chance.

TABLE 13
AAV Capsid Variant Enrichment in Heart Tissue

| | | | NHP Median | | Mouse Median |
|---|---|---|---|---|---|
| SEQ ID | | | log2 Fold | Mouse | log2 Fold |
| NO | Capsid | NHP Rho | Change | Rho | Change |
| 5027 | CVIRSSDQE | 4.69E−08 | 4.47 | 0.03 | 3.69 |
| 4633 | MACWKNATE | 3.08E−07 | 4.49 | 0.02 | 5.66 |
| 4943 | CIVFYMKNQ | 3.93E−05 | 4.07 | 0.02 | 4.95 |
| 386 | CYQFWSQYS | 1.09E−07 | 4.73 | 0.00 | 5.75 |
| 334 | CSAAFQLQP | 1.78E−05 | 4.45 | 0.00 | 4.07 |
| 4309 | CIAFVKQCC | 3.94E−06 | 4.64 | 0.03 | 3.05 |
| 4288 | CACKVSMSG | 2.30E−07 | 4.49 | 0.00 | 4.34 |
| 4964 | CVGKYGGHS | 2.71E−11 | 4.95 | 0.01 | 3.41 |
| 5017 | CFYKIQHKG | 2.18E−08 | 4.82 | 0.00 | 4.46 |
| 5814 | MACKVHLQP | 3.33E−12 | 4.94 | 0.00 | 4.66 |
| 4335 | CPMKHIQDR | 8.53E−10 | 4.65 | 0.04 | 4.95 |
| 348 | CTASWMSWD | 1.28E−07 | 4.28 | 0.02 | 3.10 |
| 4936 | CVMPYSNHP | 4.73E−08 | 4.65 | 0.02 | 4.84 |
| 5206 | CFFYPMSMS | 4.34E−07 | 4.50 | 0.04 | 2.97 |
| 4238 | AACFKQLMQ | 2.12E−07 | 4.44 | 0.03 | 2.79 |
| 5077 | CVGSQLHAM | 2.43E−07 | 4.63 | 0.02 | 5.60 |
| 5603 | QANPYNHGI | 7.85E−05 | 3.82 | 0.03 | 5.26 |

[0349] The number of capsids (“intersection size”) enriched in cardiac muscle tissue in NHPs, mice, or both NHPs and mice is shown in FIG. 16A. Seventeen capsid variants, corresponding to the capsid variants provided in TABLE 13, were enriched in cardiac tissue in both NHPs and mice. A differential expression analysis comparing cardiac muscle enrichment of the AAV capsid variants in mice and NHPs is shown in FIG. 16B. These data further demonstrated that these 17 variants (dark red circles) had significant enrichment in both NHPs (FDR <0.0001, log 2fc>1) and mice (FDR <0.05, log 2fc>1). Wild type spike-in controls are shown added at three different concentrations to the input library.

[0350] The number of capsids (“intersection size”) enriched in CNS tissue in NHPs or mice is shown in FIG. 17A. A differential expression analysis comparing CNS tissue enrichment of AAV capsid variants in mice and NHPs is shown in FIG. 17B. The 28 capsid variants enriched in NHP CNS tissue (dark gray circles) did not show enrichment in mouse CNS tissue.

### Example 11

### Treatment of a Neurological Disease or Condition with an AAV5-Derived Virion Encapsidating a Therapeutic Payload

[0351] This example describes treatment of a neurological disease or condition with a variant AAV5-derived virion having any one of the engineered CNS tropic variant AAV5 VP capsid polypeptides disclosed herein, wherein the variant AAV5 virion encapsidates a therapeutic payload. Polynucleotide sequence encoding for AAV Rep, an AAV5-derived variant Cap and helper proteins and a therapeutic payload are transfected in cells to produce variant AAV5 virions, where the polynucleotide sequence encoding for the variant AAV5 Cap comprises at least one mutation in a 581-589 region, corresponding to residues 581 to 589 in the VP1 capsid polypeptide, and where the polynucleotide sequence encodes for a variant AAV5 Cap comprising a 581-589 region amino acid sequence of any one of SEQ ID NO: 12-SEQ ID NO: 3937 or SEQ ID NO: 3938-SEQ ID NO: 4237. The therapeutic payload is a guide RNA targeting an mRNA encoded for by a gene implicated in the neurological disease or condition, or a transgene. The variant AAV5 virion encapsidating the payload is administered to a subject. The subject is a human or non-human animal. The route of administration is a systemic route of administration. The systemic route of administration is intravenous administration. Upon administration to the subject, the variant AAV5 virions encapsidating the therapeutic payload exhibit enhanced CNS tissue tropism as compared to wild type AAV5 virions encapsidating the therapeutic payload. Upon administration to the subject, a lower dose of the variant AAV5 virions encapsidating the therapeutic payload is administered as compared to wild type AAV5 virions encapsidating the therapeutic payload. Upon administration to the subject, at least one symptom of neurological disease or condition is alleviated, or the subject is cured.

### Example 12

### Treatment of Alzheimer's Disease with an AAV5-Derived Virion Encapsidating a Therapeutic Payload

[0352] This example describes treatment of Alzheimer's disease with a variant AAV5-derived virion having any one of the engineered CNS tropic variant AAV5 VP capsid polypeptides disclosed herein, wherein the variant AAV5 virion encapsidates a therapeutic payload. Polynucleotide sequence encoding for AAV Rep, an AAV5-derived variant Cap and helper proteins and a therapeutic payload are transfected in cells to produce variant AAV5 virions, where the polynucleotide sequence encoding for the variant AAV5 Cap comprises at least one mutation in a 581-589 region, corresponding to residues 581 to 589 in the VP1 capsid polypeptide, and where the polynucleotide sequence encodes for a variant AAV5 Cap comprising a 581-589 region amino acid sequence of any one of SEQ ID NO: 12-SEQ ID NO: 3937 or SEQ ID NO: 3938-SEQ ID NO: 4237. Each such variant is detargeted for all non-CNS tissues, including being detargeted for cardiac tissue. The therapeutic payload is a guide RNA targeting an mRNA encoded for by a gene implicated in Alzheimer's disease or a transgene. The mRNA targeted by the guide RNA is an mRNA encoded for by a gene encoding for amyloid precursor protein (APP), alpha-synuclein (SNCA), Tau protein (MAPT), or Apolipoprotein E (ApoE). The transgene is a gene encoding for amyloid precursor protein (APP), alpha-synuclein (SNCA), Tau protein (MAPT), or Apolipoprotein E (ApoE). The variant AAV5 virion encapsidating the payload is administered to a subject. The subject is a human or non-human animal. The route of administration is a systemic route of administration. The systemic route of administration is intravenous administration. Upon administration to the subject, the variant AAV5 virions encapsidating the therapeutic payload exhibit enhanced CNS tissue tropism as compared to wild type AAV5 virions encapsidating the therapeutic payload. Upon administration to the subject, a lower dose of the variant AAV5 virions encapsidating the therapeutic payload is administered as compared to wild type AAV5 virions encapsidating the therapeutic payload. Upon administration to the subject, at least one symptom of Alzheimer's disease is alleviated, or the subject is cured.

### Example 13

### Treatment of Parkinson's Disease with an AAV5-Derived Virion Encapsidating a Therapeutic Payload

[0353] This example describes treatment of Parkinson's disease with a variant AAV5-derived virion having any one of the engineered CNS tropic variant AAV5 VP capsid polypeptides disclosed herein, wherein the variant AAV5 virion encapsidates a therapeutic payload. Polynucleotide sequence encoding for AAV Rep, an AAV5-derived variant Cap and helper proteins and a therapeutic payload are transfected in cells to produce variant AAV5 virions, where the polynucleotide sequence encoding for the variant AAV5 Cap comprises at least one mutation in a 581-589 region, corresponding to residues 581 to 589 in the VP1 capsid polypeptide, and where the polynucleotide sequence encodes for a variant AAV5 Cap comprising a 581-589 region amino acid sequence of any one of SEQ ID NO: 12-SEQ ID NO: 3937 or SEQ ID NO: 3938-SEQ ID NO: 4237. The therapeutic payload is a guide RNA targeting an mRNA encoded for by a gene implicated in Parkinson's disease or a transgene implicated in Parkinson's disease. The mRNA targeted by the guide RNA is an mRNA encoded for by a gene encoding for leucine-rich repeat kinase 2 (LRRK2). The transgene is LRRK2; GBA1; SNCA (alpha-synuclein); AADC; GDNF; Neurturin; GAD; NTN; hFOXG1; hKCNQ2; hFMR1; anti-Tau/miRNA; EPM2A or EPM2B. The variant AAV5 virion encapsidating the payload is administered to a subject. The subject is a human or non-human animal. The route of administration is a systemic route of administration. The systemic route of administration is intravenous administration. Upon administration to the subject, the variant AAV5 virions encapsidating the therapeutic payload exhibit enhanced CNS tissue tropism as compared to wild type AAV5 virions encapsidating the therapeutic payload. Upon administration to the subject, a lower dose of the variant AAV5 virions encapsidating the therapeutic payload is administered as compared to wild type AAV5 virions encapsidating the therapeutic payload. Upon administration to the subject, at least one symptom of Parkinson's disease is alleviated, or the subject is cured.

### Example 14

### Treatment of a Tauopathy with an AAV5-Derived Virion Encapsidating a Therapeutic Payload

[0354] This example describes treatment of a Tauopathy with a variant AAV5-derived virion having any one of the engineered CNS tropic variant AAV5 VP capsid polypeptides disclosed herein, wherein the variant AAV5 virion encapsidates a therapeutic payload. Polynucleotide sequence encoding for AAV Rep, an AAV5-derived variant Cap and helper proteins and a therapeutic payload are transfected in cells to produce variant AAV5 virions, where the polynucleotide sequence encoding for the variant AAV5 Cap comprises at least one mutation in a 581-589 region, corresponding to residues 581 to 589 in the VP1 capsid polypeptide, and where the polynucleotide sequence encodes for a variant AAV5 Cap comprising a 581-589 region amino acid sequence of any one of SEQ ID NO: 12-SEQ ID NO: 3937 or SEQ ID NO: 3938-SEQ ID NO: 4237. The therapeutic payload is a guide RNA targeting an mRNA encoded for by a gene implicated in the Tauopathy or a transgene. The mRNA targeted by the guide RNA is an mRNA encoded for by a gene (MAPT) encoding for Tau protein. The transgene is MAPT. The variant AAV5 virion encapsidating the payload is administered to a subject. The subject is a human or non-human animal. The route of administration is a systemic route of administration. The systemic route of administration is intravenous administration. Upon administration to the subject, the variant AAV5 virions encapsidating the therapeutic payload exhibit enhanced CNS tissue tropism as compared to wild type AAV5 virions encapsidating the therapeutic payload. Upon administration to the subject, a lower dose of the variant AAV5 virions encapsidating the therapeutic payload is administered as compared to wild type AAV5 virions encapsidating the therapeutic payload. Upon administration to the subject, at least one symptom of Tauopathy disease is alleviated or the subject is cured.

### Example 15

### Treatment of Frontotemporal Dementia with an AAV5-Derived Virion Encapsidating a Therapeutic Payload

[0355] This example describes treatment of frontotemporal dementia (FTD) with a variant AAV5-derived virion having any one of the engineered CNS tropic variant AAV5 VP capsid polypeptides disclosed herein, wherein the variant AAV5 virion encapsidates a therapeutic payload. Polynucleotide sequence encoding for AAV Rep, an AAV5-derived variant Cap and helper proteins and a therapeutic payload are transfected in cells to produce variant AAV5 virions, where the polynucleotide sequence encoding for the variant AAV5 Cap comprises at least one mutation in a 581-589 region, corresponding to residues 581 to 589 in the VP1 capsid polypeptide, and where the polynucleotide sequence encodes for a variant AAV5 Cap comprising a 581-589 region amino acid sequence of any one of SEQ ID NO: 12-SEQ ID NO: 3937 or SEQ ID NO: 3938-SEQ ID NO: 4237. The therapeutic payload is a guide RNA targeting an mRNA encoded for by a gene implicated in FTD or a transgene encoding a protein implicated in FTD. The gene or the protein implicated in FTD is MAPT (Tau), GRN (Granulin), or progranulin. The variant AAV5 virion encapsidating the payload is administered to a subject. The subject is a human or non-human animal. The route of administration is a systemic route of administration. The systemic route of administration is intravenous administration. Upon administration to the subject, the variant AAV5 virions encapsidating the therapeutic payload exhibit enhanced CNS tissue tropism as compared to wild type AAV5 virions encapsidating the therapeutic payload. Upon administration to the subject, a lower dose of the variant AAV5 virions encapsidating the therapeutic payload is administered as compared to wild type AAV5 virions encapsidating the therapeutic payload. Upon administration to the subject, at least one symptom of FTD is alleviated, or the subject is cured.

### Example 16

### Treatment of Progressive Supranuclear Palsy with an AAV5-Derived Virion Encapsidating a Therapeutic Payload

[0356] This example describes treatment of progressive supranuclear palsy (PSP) with a variant AAV5-derived virion having any one of the engineered CNS tropic variant AAV5 VP capsid polypeptides disclosed herein, wherein the variant AAV5 virion encapsidates a therapeutic payload. Polynucleotide sequence encoding for AAV Rep, an AAV5-derived variant Cap and helper proteins and a therapeutic payload are transfected in cells to produce variant AAV5 virions, where the polynucleotide sequence encoding for the variant AAV5 Cap comprises at least one mutation in a 581-589 region, corresponding to residues 581 to 589 in the VP1 capsid polypeptide, and where the polynucleotide sequence encodes for a variant AAV5 Cap comprising a 581-589 region amino acid sequence of any one of SEQ ID NO: 12-SEQ ID NO: 3937 or SEQ ID NO: 3938-SEQ ID NO: 4237. The therapeutic payload is a guide RNA targeting an mRNA encoded for by a gene implicated in PSP or a transgene encoding a protein implicated in PSP. The gene or the protein implicated in PSP is MAPT (Tau). The variant AAV5 virion encapsidating the payload is administered to a subject. The subject is a human or non-human animal. The route of administration is a systemic route of administration. The systemic route of administration is intravenous administration. Upon administration to the subject, the variant AAV5 virions encapsidating the therapeutic payload exhibit enhanced CNS tissue tropism as compared to wild type AAV5 virions encapsidating the therapeutic payload. Upon administration to the subject, a lower dose of the variant AAV5 virions encapsidating the therapeutic payload is administered as compared to wild type AAV5 virions encapsidating the therapeutic payload. Upon administration to the subject, at least one symptom of PSP is alleviated, or the subject is cured.

### Example 17

### Treatment of Corticobasal Degeneration with an AAV5-Derived Virion Encapsidating a Therapeutic Payload

[0357] This example describes treatment of corticobasal degeneration (CBD) with a variant AAV5-derived virion having any one of the engineered CNS tropic variant AAV5 VP capsid polypeptides disclosed herein, wherein the variant AAV5 virion encapsidates a therapeutic payload. Polynucleotide sequence encoding for AAV Rep, an AAV5-derived variant Cap and helper proteins and a therapeutic payload are transfected in cells to produce variant AAV5 virions, where the polynucleotide sequence encoding for the variant AAV5 Cap comprises at least one mutation in a 581-589 region, corresponding to residues 581 to 589 in the VP1 capsid polypeptide, and where the polynucleotide sequence encodes for a variant AAV5 Cap comprising a 581-589 region amino acid sequence of any one of SEQ ID NO: 12-SEQ ID NO: 3937 or SEQ ID NO: 3938-SEQ ID NO: 4237. The therapeutic payload is a guide RNA targeting an mRNA encoded for by a gene implicated in CBD or a transgene encoding a protein implicated in CBD. The gene or the protein implicated in FTD is MAPT (Tau). The variant AAV5 virion encapsidating the payload is administered to a subject. The subject is a human or non-human animal. The route of administration is a systemic route of administration. The systemic route of administration is intravenous administration. Upon administration to the subject, the variant AAV5 virions encapsidating the therapeutic payload exhibit enhanced CNS tissue tropism as compared to wild type AAV5 virions encapsidating the therapeutic payload. Upon administration to the subject, a lower dose of the variant AAV5 virions encapsidating the therapeutic payload is administered as compared to wild type AAV5 virions encapsidating the therapeutic payload. Upon administration to the subject, at least one symptom of CBD is alleviated, or the subject is cured.

### Example 18

### Treatment of Chronic Traumatic Encephalopathy with an AAV5-derived Virion Encapsidating a Therapeutic Payload

[0358] This example describes treatment of chronic traumatic encephalopathy (CTE) with a variant AAV5-derived virion having any one of the engineered CNS tropic variant AAV5 VP capsid polypeptides disclosed herein, wherein the variant AAV5 virion encapsidates a therapeutic payload. Polynucleotide sequence encoding for AAV Rep, an AAV5-derived variant Cap and helper proteins and a therapeutic payload are transfected in cells to produce variant AAV5 virions, where the polynucleotide sequence encoding for the variant AAV5 Cap comprises at least one mutation in a 581-589 region, corresponding to residues 581 to 589 in the VP1 capsid polypeptide, and where the polynucleotide sequence encodes for a variant AAV5 Cap comprising a 581-589 region amino acid sequence of any one of SEQ ID NO: 12-SEQ ID NO: 3937 or SEQ ID NO: 3938-SEQ ID NO: 4237. The therapeutic payload is a guide RNA targeting an mRNA encoded for by a gene implicated in CTE or a transgene encoding a protein implicated in CTE. The gene or the protein implicated in CTE is MAPT (Tau). The variant AAV5 virion encapsidating the payload is administered to a subject. The subject is a human or non-human animal. The route of administration is a systemic route of administration. The systemic route of administration is intravenous administration. Upon administration to the subject, the variant AAV5 virions encapsidating the therapeutic payload exhibit enhanced CNS tissue tropism as compared to wild type AAV5 virions encapsidating the therapeutic payload. Upon administration to the subject, a lower dose of the variant AAV5 virions encapsidating the therapeutic payload is administered as compared to wild type AAV5 virions encapsidating the therapeutic payload. Upon administration to the subject, at least one symptom of CTE is alleviated, or the subject is cured.

### Example 19

### Treatment of a Synucleinopathy with an AAV5-derived Virion Encapsidating a Therapeutic Payload

[0359] This example describes treatment of a synucleinopathy with a variant AAV5-derived virion having any one of the engineered CNS tropic variant AAV5 VP capsid polypeptides disclosed herein, wherein the variant AAV5 virion encapsidates a therapeutic payload. Polynucleotide sequence encoding for AAV Rep, an AAV5-derived variant Cap and helper proteins and a therapeutic payload are transfected in cells to produce variant AAV5 virions, where the polynucleotide sequence encoding for the variant AAV5 Cap comprises at least one mutation in a 581-589 region, corresponding to residues 581 to 589 in the VP1 capsid polypeptide, and where the polynucleotide sequence encodes for a variant AAV5 Cap comprising a 581-589 region amino acid sequence of any one of SEQ ID NO: 12-SEQ ID NO: 3937 or SEQ ID NO: 3938-SEQ ID NO: 4237. The therapeutic payload is a guide RNA targeting an mRNA encoded for by a gene implicated in a synucleinopathy or a transgene encoding a protein implicated in a synucleinopathy. The gene or the protein implicated in the synucleinopathy is SNCA (α-synuclein). The variant AAV5 virion encapsidating the payload is administered to a subject. The subject is a human or non-human animal. The route of administration is a systemic route of administration. The systemic route of administration is intravenous administration. Upon administration to the subject, the variant AAV5 virions encapsidating the therapeutic payload exhibit enhanced CNS tissue tropism as compared to wild type AAV5 virions encapsidating the therapeutic payload. Upon administration to the subject, a lower dose of the variant AAV5 virions encapsidating the therapeutic payload is administered as compared to wild type AAV5 virions encapsidating the therapeutic payload. Upon administration to the subject, at least one symptom of the synucleinopathy is alleviated, or the subject is cured.

### Example 20

### Treatment of Rett Syndrome with an AAV5-derived Virion Encapsidating a Therapeutic Payload

[0360] This example describes treatment of Rett syndrome with a variant AAV5-derived virion having any one of the engineered CNS tropic variant AAV5 VP capsid polypeptides disclosed herein, wherein the variant AAV5 virion encapsidates a therapeutic payload. Polynucleotide sequence encoding for AAV Rep, an AAV5-derived variant Cap and helper proteins and a therapeutic payload are transfected in cells to produce variant AAV5 virions, where the polynucleotide sequence encoding for the variant AAV5 Cap comprises at least one mutation in a 581-589 region, corresponding to residues 581 to 589 in the VP1 capsid polypeptide, and where the polynucleotide sequence encodes for a variant AAV5 Cap comprising a 581-589 region amino acid sequence of any one of SEQ ID NO: 12-SEQ ID NO: 3937 or SEQ ID NO: 3938-SEQ ID NO: 4237. The therapeutic payload is a guide RNA targeting an mRNA encoded for by a gene implicated in Rett syndrome, a suppressor tRNA targeting a premature termination codon (PTC) in a gene implicated in Rett syndrome, or a transgene. The mRNA targeted by the guide RNA is an mRNA encoded for by a gene encoding for MECP2. The suppressor tRNA targets a PTC in MECP2. The transgene is MECP2. The variant AAV5 virion encapsidating the payload is administered to a subject. The subject is a human or non-human animal. The route of administration is a systemic route of administration. The systemic route of administration is intravenous administration. Upon administration to the subject, the variant AAV5 virions encapsidating the therapeutic payload exhibit enhanced CNS tissue tropism as compared to wild type AAV5 virions encapsidating the therapeutic payload. Upon administration to the subject, a lower dose of the variant AAV5 virions encapsidating the therapeutic payload is administered as compared to wild type AAV5 virions encapsidating the therapeutic payload. Upon administration to the subject, at least one symptom of Rett syndrome is alleviated or the subject is cured.

### Example 21

### Treatment of a Cardiac Disorder with an AAV5-derived Virion Encapsidating a Therapeutic Payload

[0361] This example describes treatment of a cardiac disorder with a variant AAV5-derived virion having any one of the engineered muscle-tropic variant AAV5 VP capsid polypeptides disclosed herein, wherein the variant AAV5 virion encapsidates a therapeutic payload. Polynucleotide sequence encoding for AAV Rep, an AAV5-derived variant Cap and helper proteins and a therapeutic payload are transfected in cells to produce variant AAV5 virions, where the polynucleotide sequence encoding for the variant AAV5 Cap comprises at least one mutation in a 581-589 region, corresponding to residues 581 to 589 in the VP1 capsid polypeptide, and where the polynucleotide sequence encodes for a variant AAV5 Cap comprising a 581-589 region amino acid sequence of any one of SEQ ID NO: 4238-SEQ ID NO: 4933 or SEQ ID NO: 4934-SEQ ID NO: 5233. The therapeutic payload is a guide RNA targeting an mRNA encoded for by a gene implicated in the cardiac disorder or a transgene implicated in the cardiac disorder. The variant AAV5 virion encapsidating the payload is administered to a subject. The subject is a human or non-human animal. The route of administration is a systemic route of administration. The systemic route of administration is intravenous administration. Upon administration to the subject, the variant AAV5 virions encapsidating the therapeutic payload exhibit enhanced muscle tissue tropism as compared to wild type AAV5 virions encapsidating the therapeutic payload. Upon administration to the subject, a lower dose of the variant AAV5 virions encapsidating the therapeutic payload is administered as compared to wild type AAV5 virions encapsidating the therapeutic payload. Upon administration to the subject, at least one symptom of the cardiac disorder is alleviated, or the subject is cured.

### Example 22

### Treatment of a Skeletal Muscle Disorder with an AAV5-derived Virion Encapsidating a Therapeutic Payload

[0362] This example describes treatment of a skeletal muscle disorder with a variant AAV5-derived virion having any one of the engineered muscle-tropic variant AAV5 VP capsid polypeptides disclosed herein, wherein the variant AAV5 virion encapsidates a therapeutic payload. Polynucleotide sequence encoding for AAV Rep, an AAV5-derived variant Cap and helper proteins and a therapeutic payload are transfected in cells to produce variant AAV5 virions, where the polynucleotide sequence encoding for the variant AAV5 Cap comprises at least one mutation in a 581-589 region, corresponding to residues 581 to 589 in the VP1 capsid polypeptide, and where the polynucleotide sequence encodes for a variant AAV5 Cap comprising a 581-589 region amino acid sequence of any one of SEQ ID NO: 4238-SEQ ID NO: 4933 or SEQ ID NO: 4934-SEQ ID NO: 5233. The therapeutic payload is a guide RNA targeting an mRNA encoded for by a gene implicated in the skeletal muscle disorder or a transgene implicated in the skeletal muscle disorder. The variant AAV5 virion encapsidating the payload is administered to a subject. The subject is a human or non-human animal. The route of administration is a systemic route of administration. The systemic route of administration is intravenous administration. Upon administration to the subject, the variant AAV5 virions encapsidating the therapeutic payload exhibit enhanced muscle tissue tropism as compared to wild type AAV5 virions encapsidating the therapeutic payload. Upon administration to the subject, a lower dose of the variant AAV5 virions encapsidating the therapeutic payload is administered as compared to wild type AAV5 virions encapsidating the therapeutic payload. Upon administration to the subject, at least one symptom of the skeletal muscle disorder is alleviated, or the subject is cured.

### Example 23

### Treatment of Duchenne Muscular Dystrophy with an AAV5-derived Virion Encapsidating a Therapeutic Payload

[0363] This example describes treatment of Duchenne muscular dystrophy with a variant AAV5-derived virion having any one of the engineered muscle-tropic variant AAV5 VP capsid polypeptides disclosed herein, wherein the variant AAV5 virion encapsidates a therapeutic payload. Polynucleotide sequence encoding for AAV Rep, an AAV5-derived variant Cap and helper proteins and a therapeutic payload are transfected in cells to produce variant AAV5 virions, where the polynucleotide sequence encoding for the variant AAV5 Cap comprises at least one mutation in a 581-589 region, corresponding to residues 581 to 589 in the VP1 capsid polypeptide, and where the polynucleotide sequence encodes for a variant AAV5 Cap comprising a 581-589 region amino acid sequence of any one of SEQ ID NO: 4238-SEQ ID NO: 4933 or SEQ ID NO: 4934-SEQ ID NO: 5233. The therapeutic payload is a guide RNA targeting an mRNA encoded for by a gene implicated in Duchenne muscular dystrophy or a transgene Duchenne muscular dystrophy. The mRNA targeted by the guide RNA is an mRNA encoded for by a gene encoding for DMID. The transgene is DMID. The variant AAV5 virion encapsidating the payload is administered to a subject. The subject is a human or non-human animal. The route of administration is a systemic route of administration. The systemic route of administration is intravenous administration. Upon administration to the subject, the variant AAV5 virions encapsidating the therapeutic payload exhibit enhanced muscle tissue tropism as compared to wild type AAV5 virions encapsidating the therapeutic payload. Upon administration to the subject, a lower dose of the variant AAV5 virions encapsidating the therapeutic payload is administered as compared to wild type AAV5 virions encapsidating the therapeutic payload. Upon administration to the subject, at least one symptom of Duchenne muscular dystrophy is alleviated, or the subject is cured.

### Example 24

### Treatment of Facioscapulohumeral Muscular Dystrophy with an AAV5-derived Virion Encapsidating a Therapeutic Payload

[0364] This example describes treatment of facioscapulohumeral muscular dystrophy-1 (FSHD) with a variant AAV5-derived virion having any one of the engineered muscle-tropic variant AAV5 VP capsid polypeptides disclosed herein, wherein the variant AAV5 virion encapsidates a therapeutic payload. Polynucleotide sequence encoding for AAV Rep, an AAV5-derived variant Cap and helper proteins and a therapeutic payload are transfected in cells to produce variant AAV5 virions, where the polynucleotide sequence encoding for the variant AAV5 Cap comprises at least one mutation in a 581-589 region, corresponding to residues 581 to 589 in the VP1 capsid polypeptide, and where the polynucleotide sequence encodes for a variant AAV5 Cap comprising a 581-589 region amino acid sequence of any one of SEQ ID NO: 4238-SEQ ID NO: 4933 or SEQ ID NO: 4934-SEQ ID NO: 5233. The therapeutic payload is a guide RNA targeting an mRNA encoded for by a gene implicated in FSHD or a transgene implicated in FSHD. The mRNA targeted by the guide RNA is an mRNA encoded for by a gene encoding for DUX4. The transgene is DUX4. The variant AAV5 virion encapsidating the payload is administered to a subject. The subject is a human or non-human animal. The route of administration is a systemic route of administration. The systemic route of administration is intravenous administration. Upon administration to the subject, the variant AAV5 virions encapsidating the therapeutic payload exhibit enhanced muscle tissue tropism as compared to wild type AAV5 virions encapsidating the therapeutic payload. Upon administration to the subject, a lower dose of the variant AAV5 virions encapsidating the therapeutic payload is administered as compared to wild type AAV5 virions encapsidating the therapeutic payload. Upon administration to the subject, at least one symptom of FSHD is alleviated, or the subject is cured.

### Example 25

### Tissue Abundance of Engineered AAV5 Variants by DNA Analysis

[0365] This example demonstrates the tissue abundance of engineered AAV5 variants of the present disclosure as compared to control serotypes by DNA analysis. The CNS-targeted secondary library of the present disclosure comprising engineered AAV5 variants was administered intravenously to four cynomolgus macaques. Four weeks post-injection, animals were euthanized, and a diverse set of tissues was collected for DNA (measuring total variant infection) and RNA (measuring functional transduction) analysis.

[0366] FIG. 3A shows a next generation sequencing (NGS) analysis of purified secondary screen library virus containing engineered AAV5 variants of the present disclosure and barcoded control serotypes (AAV1, AAV2, AAV5, AAV9, and AAV PHP.B) spiked in at 1×, 10×, and 100× stoichiometric ratios. FIG. 3B is a schematic highlighting identification of AAV spike-in control DNA in CNS, liver, heart, and skeletal muscle by NGS analysis of NHP tissues post-selection. FIG. 3C demonstrates that DNA from 94% of capsid variants predicted to target the CNS were found in the CNS. FIG. 3D demonstrates that in a comparison of DNA abundance in the CNS for three engineered AAV5 variants of the present disclosure (AAGRFNYFG (SEQ ID NO: 18), AEDYWDLGA (SEQ ID NO: 54), and MDDICEFYA (SEQ ID NO: 2028)) versus wild type AAV5 and AAV9 spike-in controls, the three engineered AAV5 variants show much greater infection than the highest (100×) controls. FIG. 3E shows that engineered AAV5 variants of the present disclosure exhibit decreased liver infection compared to wild type (parental) AAV5 control.

[0367] As demonstrated in FIG. 3A-FIG. 3E, select engineered AAV5 variants of the present disclosure exhibited greater than 100-fold infectivity for CNS and exhibited liver detuning as compared to control serotypes, including commonly used wild type AAVs.

### Example 26

### Functional Transduction of RNA Expression in CNS Tissue

[0368] This example demonstrates functional transduction of RNA expression in CNS tissue using CNS tissue-tropic variants. Variants of SEQ ID NO: 18 (AAGRFNYFG), SEQ ID NO: 424 (DAWCFISSY), and SEQ ID NO: 2028 (MDDICEFYA) were compared. A library of barcoded AAV variants was systemically administered to non-human primates. Wild type AAV9 was also administered for reference. Tissues were harvested from the non-human primates, and barcoded DNA was quantified to measure accumulation of the AAV variants in each tissue. RNA expressed from the DNA payload was also quantified to measure functional transduction.

[0369] Relative accumulation of AAVs and functional transduction of RNA expression for wild type AAV9 and three CNS tissue-tropic AAV variants (SEQ ID NO: 18, SEQ ID NO: 424, and SEQ ID NO: 2028) is shown in FIG. 10. The three AAV variants exhibited increased CNS tissue tropism, as measured by DNA accumulation, compared to wild type AAV9. The three AAV variants also exhibited CNS tissue-specific transduction of RNA expression. The AAV variants also exhibited broad accumulation and functional transduction in various CNS tissues, including occipital cortex, motor cortex, forebrain, thalamus, striatum, hypothalamus, cerebellum, caudate, putamen, pons, midbrain, and substantia nigra, as shown in FIG. 11. The AAV variant comprising a sequence of SEQ ID NO: 2028 showed broad functional transduction in various CNS tissues compared to wild type AAV9, as shown in FIG. 12.

[0370] FIG. 13 shows that three AAV variants of the present disclosure (also shown in FIG. 11) functionally transduce neurons. CAG promoter-driven RNA expression highlights functional transduction of any cell type while SYN promoter-driven RNA expression highlights functional transduction of neurons. FIG. 14 shows that some AAV variants of the present disclosure that target CNS also demonstrate dorsal root ganglion (DRG) depletion.

### Example 27

### Functional Transduction of RNA Expression in CNS Tissue Versus Heart Muscle Tissues

[0371] This example demonstrates functional transduction of RNA expression in CNS tissue and heart muscle tissue. A library of barcoded AAV variants was systemically administered to non-human primates. Wild type AAV9 was also administered for reference. Tissues were harvested from the non-human primates, and DNA and RNA were quantified.

[0372] FIG. 15 shows that promoter usage differentiates CNS AAV variants and heart muscle AAV variants. For example, certain AAV CNS variants of the present disclosure shown CAG and SYN promoter-driven RNA expression, while certain AAV heart muscle variants show only CAG promoter-driven RNA expression.

### Example 28

### Singleplex Tertiary Screen to Validate CNS Tissue-Tropic Engineered AAV Capsids

[0373] This example describes a tertiary screen, in singleplex, to identify CNS tissue-tropic engineered AAV capsids. Prospective tissue-tropic capsids identified from an in vivo secondary screen, through machine learning, or both are introduced into an in vivo tertiary screen, in singleplex, to confirm tissue-tropic behavior of the identified capsids when individually dosed in NHP. Capsid variant sequences including SEQ ID NO: 2028, SEQ ID NO: 18, SEQ ID NO: 54, and SEQ ID NO: 424 are selected for singleplex screening. Recombinant AAVs of the selected variants encapsidate a model transgene. The transgene is GFP or a tagged frataxin protein. The tertiary screen capsid library is systemically administered to a non-human primate (NHP) by intravenous injection. Following injection, tissues, including CNS and liver, are isolated from the NHP, and the sequences are quantified. Prospective tissue-tropic capsids are compared to control, wild-type AAV to identify superior variant capsids of the present disclosure that target various CNS tissues using DNA and RNA analysis.

[0374] Preliminary DNA Enrichment Results. In a pilot study, four male NHPs were intravenously administered, in singleplex, wild-type AAV9 or a capsid variant of the present disclosure of having a 581-589 region of MDDICEFYA (SEQ ID NO: 2028), AAGRFNYFG (SEQ ID NO: 18), or AEDYWDLGA (SEQ ID NO: 54), each carrying a GFP transgene under control of a CMV promoter. Virus was administered at a dose of 3E13 viral genomes (VGs)/kg. Two weeks post-administration, NHPs were euthanized, and various tissues were harvested, including CNS and liver tissues. A kit was used to extract DNA from tissues, and primers against the CMV region of the transgene and GAPDH were used to track vector and genomic counts. DNA was quantitated via droplet digital PCR (ddPCR). In a preliminary analysis of an n=1 regional biopsy (4 mm tissue punches) from several CNS tissue regions (caudate; putamen; cerebellum; cortex, forebrain; cortex, occipital; cortex, temporal; midbrain; pons; substantia nigra; thalamus; motor cortex; Broca's area; hippocampus; hypothalamus; globus pallidus; Wernicke's area; and medulla) and liver tissue regions, the three capsid variants of the present disclosure each exhibited at least about a 7-fold average enrichment across brain regions and at least about a 4-fold average decrease in liver enrichment.

[0375] Further analyses are conducted to confirm the preliminary analysis and explore selectivity for CNS tissues as compared to liver and other tissues harvested from NHPs.

### Example 29

### Singleplex Tertiary Screen to Validate Muscle Tissue-Tropic Engineered AAV Capsids

[0376] This example describes a tertiary screen, in singleplex, to identify muscle tissue-tropic engineered AAV capsids. Prospective tissue-tropic capsids identified from an in vivo secondary screen, through machine learning, or both are introduced into an in vivo tertiary screen, in singleplex, to confirm tissue-tropic behavior of the identified capsids when individually dosed in NHP. Capsid variant sequences of the present disclosure are selected for singleplex screening. Recombinant AAVs of the selected variants encapsidate a model transgene. The tertiary screen capsid library is systemically administered to a non-human primate (NHP) by intravenous injection. Following injection, tissues, including muscle and liver, are isolated from the NHP, and the sequences are quantified. Prospective tissue-tropic capsids are compared to control, wild-type AAV to identify superior variant capsids of the present disclosure that target various muscle tissues using DNA and RNA analysis.

[0377] While the invention has been particularly shown and described with reference to a preferred embodiment and various alternate embodiments, it is understood by persons skilled in the relevant art that various changes in form and details can be made therein without departing from the spirit and scope of the invention.

The application's sequence listing, which the Patent Office published only in electronic form, follows.

SEQUENCE LISTING (5817 sequences)

SEQ ID NO: 1 - protein, 724 aa, Adeno-associated virus 5
MSFVDHPPDWLEEVGEGLREFLGLEAGPPKPKPNQQHQDQARGLVLPGYNYLGPGNGLDRGEPVNRADEVAREHDISYNEQLEAGDNPYLKYNHADAEFQEKLADDTSFGGNLGKAVFQAKKRVLEPFGLVEEGAKTAPTGKRIDDHFPKRKKARTEEDSKPSTSSDAEAGPSGSQQLQIPAQPASSLGADTMSAGGGGPLGDNNQGADGVGNASGDWHCDSTWMGDRVVTKSTRTWVLPSYNNHQYREIKSGSVDGSNANAYFGYSTPWGYFDFNRFHSHWSPRDWQRLINNYWGFRPRSLRVKIFNIQVKEVTVQDSTTTIANNLTSTVQVFTDDDYQLPYVVGNGTEGCLPAFPPQVFTLPQYGYATLNRDNTENPTERSSFFCLEYFPSKMLRTGNNFEFTYNFEEVPFHSSFAPSQNLFKLANPLVDQYLYRFVSTNNTGGVQFNKNLAGRYANTYKNWFPGPMGRTQGWNLGSGVNRASVSAFATTNRMELEGASYQVPPQPNGMTNNLQGSNTYALENTMIFNSQPANPGTTATYLEGNMLITSESETQPVNRVAYNVGGQMATNNQSSTTAPATGTYNLQEIVPGSVWMERDVYLQGPIWAKIPETGAHFHPSPAMGGFGLKHPPPMMLIKNTPVPGNITSFSDVPVSSFITQYSTGQVTVEMEWELKKENSKRWNPEIQYTNNYNDPQFVDFAPDSTGEYRTTRPIGTRYLTRPL

SEQ ID NO: 2 - protein, 724 aa, synthetic construct
  VARIANT 581: note = A, R, N, D, C, E, Q, G, H, I, L, K, M, F, P, S, T, W, Y, or V
  VARIANT 582: note = A, R, N, D, C, E, Q, G, H, I, L, K, M, F, P, S, T, W, Y, or V
  VARIANT 583: note = A, R, N, D, C, E, Q, G, H, I, L, K, M, F, P, S, T, W, Y, or V
  VARIANT 584: note = A, R, N, D, C, E, Q, G, H, I, L, K, M, F, P, S, T, W, Y, or V
  VARIANT 585: note = A, R, N, D, C, E, Q, G, H, I, L, K, M, F, P, S, T, W, Y, or V
  VARIANT 586: note = A, R, N, D, C, E, Q, G, H, I, L, K, M, F, P, S, T, W, Y, or V
  VARIANT 587: note = A, R, N, D, C, E, Q, G, H, I, L, K, M, F, P, S, T, W, Y, or V
  VARIANT 588: note = A, R, N, D, C, E, Q, G, H, I, L, K, M, F, P, S, T, W, Y, or V
  VARIANT 589: note = A, R, N, D, C, E, Q, G, H, I, L, K, M, F, P, S, T, W, Y, or V
MSFVDHPPDWLEEVGEGLREFLGLEAGPPKPKPNQQHQDQARGLVLPGYNYLGPGNGLDRGEPVNRADEVAREHDISYNEQLEAGDNPYLKYNHADAEFQEKLADDTSFGGNLGKAVFQAKKRVLEPFGLVEEGAKTAPTGKRIDDHFPKRKKARTEEDSKPSTSSDAEAGPSGSQQLQIPAQPASSLGADTMSAGGGGPLGDNNQGADGVGNASGDWHCDSTWMGDRVVTKSTRTWVLPSYNNHQYREIKSGSVDGSNANAYFGYSTPWGYFDFNRFHSHWSPRDWQRLINNYWGFRPRSLRVKIFNIQVKEVTVQDSTTTIANNLTSTVQVFTDDDYQLPYVVGNGTEGCLPAFPPQVFTLPQYGYATLNRDNTENPTERSSFFCLEYFPSKMLRTGNNFEFTYNFEEVPFHSSFAPSQNLFKLANPLVDQYLYRFVSTNNTGGVQFNKNLAGRYANTYKNWFPGPMGRTQGWNLGSGVNRASVSAFATTNRMELEGASYQVPPQPNGMTNNLQGSNTYALENTMIFNSQPANPGTTATYLEGNMLITSESETQPVNRVAYNVGGQMATNNQSSTTAPXXXXXXXXXIVPGSVWMERDVYLQGPIWAKIPETGAHFHPSPAMGGFGLKHPPPMMLIKNTPVPGNITSFSDVPVSSFITQYSTGQVTVEMEWELKKENSKRWNPEIQYTNNYNDPQFVDFAPDSTGEYRTTRPIGTRYLTRPL

SEQ ID NO: 3 - protein, 724 aa, synthetic construct
MSFVDHPPDWLEEVGEGLREFLGLEAGPPKPKPNQQHQDQARGLVLPGYNYLGPGNGLDRGEPVNRADEVAREHDISYNEQLEAGDNPYLKYNHADAEFQEKLADDTSFGGNLGKAVFQAKKRVLEPFGLVEEGAKTAPTGKRIDDHFPKRKKARTEEDSKPSTSSDAEAGPSGSQQLQIPAQPASSLGADTMSAGGGGPLGDNNQGADGVGNASGDWHCDSTWMGDRVVTKSTRTWVLPSYNNHQYREIKSGSVDGSNANAYFGYSTPWGYFDFNRFHSHWSPRDWQRLINNYWGFRPRSLRVKIFNIQVKEVTVQDSTTTIANNLTSTVQVFTDDDYQLPYVVGNGTEGCLPAFPPQVFTLPQYGYATLNRDNTENPTERSSFFCLEYFPSKMLRTGNNFEFTYNFEEVPFHSSFAPSQNLFKLANPLVDQYLYRFVSTNNTGGVQFNKNLAGRYANTYKNWFPGPMGRTQGWNLGSGVNRASVSAFATTNRMELEGASYQVPPQPNGMTNNLQGSNTYALENTMIFNSQPANPGTTATYLEGNMLITSESETQPVNRVAYNVGGQMATNNQSSTTAPATGTVNLQEIVPGSVWMERDVYLQGPIWAKIPETGAHFHPSPAMGGFGLKHPPPMMLIKNTPVPGNITSFSDVPVSSFITQYSTGQVTVEMEWELKKENSKRWNPEIQYTNNYNDPQFVDFAPDSTGEYRTTRPIGTRYLTRPL

SEQ ID NO: 4 - protein, 724 aa, synthetic construct
MSFVDHPPDWLEEVGEGLREFLGLEAGPPKPKPNQQHQDQARGLVLPGYNYLGPGNGLDRGEPVNRADEVAREHDISYNEQLEAGDNPYLKYNHADAEFQEKLADDTSFGGNLGKAVFQAKKRVLEPFGLVEEGAKTAPTGKRIDDHFPKRKKARTEEDSKPSTSSDAEAGPSGSQQLQIPAQPASSLGADTMSAGGGGPLGDNNQGADGVGNASGDWHCDSTWMGDRVVTKSTRTWVLPSYNNHQYREIKSGSVDGSNANAYFGYSTPWGYFDFNRFHSHWSPRDWQRLINNYWGFRPRSLRVKIFNIQVKEVTVQDSTTTIANNLTSTVQVFTDDDYQLPYVVGNGTEGCLPAFPPQVFTLPQYGYATLNRDNTENPTERSSFFCLEYFPSKMLRTGNNFEFTYNFEEVPFHSSFAPSQNLFKLANPLVDQYLYRFVSTNNTGGVQFNKNLAGRYANTYKNWFPGPMGRTQGWNLGSGVNRASVSAFATTNRMELEGASYQVPPQPNGMTNNLQGSNTYALENTMIFNSQPANPGTTATYLEGNMLITSESETQPVNRVAYNVGGQMATNNQSSTTAPATGTYNTQEIVPGSVWMERDVYLQGPIWAKIPETGAHFHPSPAMGGFGLKHPPPMMLIKNTPVPGNITSFSDVPVSSFITQYSTGQVTVEMEWELKKENSKRWNPEIQYTNNYNDPQFVDFAPDSTGEYRTTRPIGTRYLTRPL

SEQ ID NO: 5 - protein, 724 aa, synthetic construct
MSFVDHPPDWLEEVGEGLREFLGLEAGPPKPKPNQQHQDQARGLVLPGYNYLGPGNGLDRGEPVNRADEVAREHDISYNEQLEAGDNPYLKYNHADAEFQEKLADDTSFGGNLGKAVFQAKKRVLEPFGLVEEGAKTAPTGKRIDDHFPKRKKARTEEDSKPSTSSDAEAGPSGSQQLQIPAQPASSLGADTMSAGGGGPLGDNNQGADGVGNASGDWHCDSTWMGDRVVTKSTRTWVLPSYNNHQYREIKSGSVDGSNANAYFGYSTPWGYFDFNRFHSHWSPRDWQRLINNYWGFRPRSLRVKIFNIQVKEVTVQDSTTTIANNLTSTVQVFTDDDYQLPYVVGNGTEGCLPAFPPQVFTLPQYGYATLNRDNTENPTERSSFFCLEYFPSKMLRTGNNFEFTYNFEEVPFHSSFAPSQNLFKLANPLVDQYLYRFVSTNNTGGVQFNKNLAGRYANTYKNWFPGPMGRTQGWNLGSGVNRASVSAFATTNRMELEGASYQVPPQPNGMTNNLQGSNTYALENTMIFNSQPANPGTTATYLEGNMLITSESETQPVNRVAYNVGGQMATNNQSSTTAPTTGTYNLQEIVPGSVWMERDVYLQGPIWAKIPETGAHFHPSPAMGGFGLKHPPPMMLIKNTPVPGNITSFSDVPVSSFITQYSTGQVTVEMEWELKKENSKRWNPEIQYTNNYNDPQFVDFAPDSTGEYRTTRPIGTRYLTRPL

SEQ ID NO: 6 - protein, 724 aa, synthetic construct
MSFVDHPPDWLEEVGEGLREFLGLEAGPPKPKPNQQHQDQARGLVLPGYNYLGPGNGLDRGEPVNRADEVAREHDISYNEQLEAGDNPYLKYNHADAEFQEKLADDTSFGGNLGKAVFQAKKRVLEPFGLVEEGAKTAPTGKRIDDHFPKRKKARTEEDSKPSTSSDAEAGPSGSQQLQIPAQPASSLGADTMSAGGGGPLGDNNQGADGVGNASGDWHCDSTWMGDRVVTKSTRTWVLPSYNNHQYREIKSGSVDGSNANAYFGYSTPWGYFDFNRFHSHWSPRDWQRLINNYWGFRPRSLRVKIFNIQVKEVTVQDSTTTIANNLTSTVQVFTDDDYQLPYVVGNGTEGCLPAFPPQVFTLPQYGYATLNRDNTENPTERSSFFCLEYFPSKMLRTGNNFEFTYNFEEVPFHSSFAPSQNLFKLANPLVDQYLYRFVSTNNTGGVQFNKNLAGRYANTYKNWFPGPMGRTQGWNLGSGVNRASVSAFATTNRMELEGASYQVPPQPNGMTNNLQGSNTYALENTMIFNSQPANPGTTATYLEGNMLITSESETQPVNRVAYNVGGQMATNNQSSTTAPAAGTYNLQEIVPGSVWMERDVYLQGPIWAKIPETGAHFHPSPAMGGFGLKHPPPMMLIKNTPVPGNITSFSDVPVSSFITQYSTGQVTVEMEWELKKENSKRWNPEIQYTNNYNDPQFVDFAPDSTGEYRTTRPIGTRYLTRPL

SEQ ID NO: 7 - protein, 724 aa, synthetic construct
MSFVDHPPDWLEEVGEGLREFLGLEAGPPKPKPNQQHQDQARGLVLPGYNYLGPGNGLDRGEPVNRADEVAREHDISYNEQLEAGDNPYLKYNHADAEFQEKLADDTSFGGNLGKAVFQAKKRVLEPFGLVEEGAKTAPTGKRIDDHFPKRKKARTEEDSKPSTSSDAEAGPSGSQQLQIPAQPASSLGADTMSAGGGGPLGDNNQGADGVGNASGDWHCDSTWMGDRVVTKSTRTWVLPSYNNHQYREIKSGSVDGSNANAYFGYSTPWGYFDFNRFHSHWSPRDWQRLINNYWGFRPRSLRVKIFNIQVKEVTVQDSTTTIANNLTSTVQVFTDDDYQLPYVVGNGTEGCLPAFPPQVFTLPQYGYATLNRDNTENPTERSSFFCLEYFPSKMLRTGNNFEFTYNFEEVPFHSSFAPSQNLFKLANPLVDQYLYRFVSTNNTGGVQFNKNLAGRYANTYKNWFPGPMGRTQGWNLGSGVNRASVSAFATTNRMELEGASYQVPPQPNGMTNNLQGSNTYALENTMIFNSQPANPGTTATYLEGNMLITSESETQPVNRVAYNVGGQMATNNQSSTTAPATGAYNLQEIVPGSVWMERDVYLQGPIWAKIPETGAHFHPSPAMGGFGLKHPPPMMLIKNTPVPGNITSFSDVPVSSFITQYSTGQVTVEMEWELKKENSKRWNPEIQYTNNYNDPQFVDFAPDSTGEYRTTRPIGTRYLTRPL

SEQ ID NO: 8 - protein, 724 aa, synthetic construct
MSFVDHPPDWLEEVGEGLREFLGLEAGPPKPKPNQQHQDQARGLVLPGYNYLGPGNGLDRGEPVNRADEVAREHDISYNEQLEAGDNPYLKYNHADAEFQEKLADDTSFGGNLGKAVFQAKKRVLEPFGLVEEGAKTAPTGKRIDDHFPKRKKARTEEDSKPSTSSDAEAGPSGSQQLQIPAQPASSLGADTMSAGGGGPLGDNNQGADGVGNASGDWHCDSTWMGDRVVTKSTRTWVLPSYNNHQYREIKSGSVDGSNANAYFGYSTPWGYFDFNRFHSHWSPRDWQRLINNYWGFRPRSLRVKIFNIQVKEVTVQDSTTTIANNLTSTVQVFTDDDYQLPYVVGNGTEGCLPAFPPQVFTLPQYGYATLNRDNTENPTERSSFFCLEYFPSKMLRTGNNFEFTYNFEEVPFHSSFAPSQNLFKLANPLVDQYLYRFVSTNNTGGVQFNKNLAGRYANTYKNWFPGPMGRTQGWNLGSGVNRASVSAFATTNRMELEGASYQVPPQPNGMTNNLQGSNTYALENTMIFNSQPANPGTTATYLEGNMLITSESETQPVNRVAYNVGGQMATNNQSSTTAPATGTVNTQEIVPGSVWMERDVYLQGPIWAKIPETGAHFHPSPAMGGFGLKHPPPMMLIKNTPVPGNITSFSDVPVSSFITQYSTGQVTVEMEWELKKENSKRWNPEIQYTNNYNDPQFVDFAPDSTGEYRTTRPIGTRYLTRPL

SEQ ID NO: 9 - protein, 9 aa, Adeno-associated virus 5
ATGTYNLQE

SEQ ID NO: 10 - protein, 588 aa, Adeno-associated virus 5
TAPTGKRIDDHFPKRKKARTEEDSKPSTSSDAEAGPSGSQQLQIPAQPASSLGADTMSAGGGGPLGDNNQGADGVGNASGDWHCDSTWMGDRVVTKSTRTWVLPSYNNHQYREIKSGSVDGSNANAYFGYSTPWGYFDFNRFHSHWSPRDWQRLINNYWGFRPRSLRVKIFNIQVKEVTVQDSTTTIANNLTSTVQVFTDDDYQLPYVVGNGTEGCLPAFPPQVFTLPQYGYATLNRDNTENPTERSSFFCLEYFPSKMLRTGNNFEFTYNFEEVPFHSSFAPSQNLFKLANPLVDQYLYRFVSTNNTGGVQFNKNLAGRYANTYKNWFPGPMGRTQGWNLGSGVNRASVSAFATTNRMELEGASYQVPPQPNGMTNNLQGSNTYALENTMIFNSQPANPGTTATYLEGNMLITSESETQPVNRVAYNVGGQMATNNQSSTTAPATGTYNLQEIVPGSVWMERDVYLQGPIWAKIPETGAHFHPSPAMGGFGLKHPPPMMLIKNTPVPGNITSFSDVPVSSFITQYSTGQVTVEMEWELKKENSKRWNPEIQYTNNYNDPQFVDFAPDSTGEYRTTRPIGTRYLTRPL

SEQ ID NO: 11 - protein, 532 aa, Adeno-associated virus 5
MSAGGGGPLGDNNQGADGVGNASGDWHCDSTWMGDRVVTKSTRTWVLPSYNNHQYREIKSGSVDGSNANAYFGYSTPWGYFDFNRFHSHWSPRDWQRLINNYWGFRPRSLRVKIFNIQVKEVTVQDSTTTIANNLTSTVQVFTDDDYQLPYVVGNGTEGCLPAFPPQVFTLPQYGYATLNRDNTENPTERSSFFCLEYFPSKMLRTGNNFEFTYNFEEVPFHSSFAPSQNLFKLANPLVDQYLYRFVSTNNTGGVQFNKNLAGRYANTYKNWFPGPMGRTQGWNLGSGVNRASVSAFATTNRMELEGASYQVPPQPNGMTNNLQGSNTYALENTMIFNSQPANPGTTATYLEGNMLITSESETQPVNRVAYNVGGQMATNNQSSTTAPATGTYNLQEIVPGSVWMERDVYLQGPIWAKIPETGAHFHPSPAMGGFGLKHPPPMMLIKNTPVPGNITSFSDVPVSSFITQYSTGQVTVEMEWELKKENSKRWNPEIQYTNNYNDPQFVDFAPDSTGEYRTTRPIGTRYLTRPL

SEQ ID NO: 12 - protein, 9 aa, synthetic construct
AAANMYWWS

SEQ ID NO: 13 - protein, 9 aa, synthetic construct
AAAQSPEGV

SEQ ID NO: 14 - protein, 9 aa, synthetic construct
AAAVQWQMM

SEQ ID NO: 15 - protein, 9 aa, synthetic construct
AACHIMSQT

SEQ ID NO: 16 - protein, 9 aa, synthetic construct
AAEPQHCYY

SEQ ID NO: 17 - protein, 9 aa, synthetic construct
AAGQFEWLH

SEQ ID NO: 18 - protein, 9 aa, synthetic construct
AAGRFNYFG

SEQ ID NO: 19 - protein, 9 aa, synthetic construct
AAGTHHVMR

SEQ ID NO: 20 - protein, 9 aa, synthetic construct
AAGVVQRGE

SEQ ID NO: 21 - protein, 9 aa, synthetic construct
AALNTQLGH

SEQ ID NO: 22 - protein, 9 aa, synthetic construct
AALSSRQVL

SEQ ID NO: 23 - protein, 9 aa, synthetic construct
AALSWRSHF

SEQ ID NO: 24 - protein, 9 aa, synthetic construct
AALYSQRAQ

SEQ ID NO: 25 - protein, 9 aa, synthetic construct
AAMPINMCC

SEQ ID NO: 26 - protein, 9 aa, synthetic construct
AAMTQHCPV

SEQ ID NO: 27 - protein, 9 aa, synthetic construct
AANDCQIWF

SEQ ID NO: 28 - protein, 9 aa, synthetic construct
AANYYATSW

SEQ ID NO: 29 - protein, 9 aa, synthetic construct
AAQFDGFHV

SEQ ID NO: 30 - protein, 9 aa, synthetic construct
AAQLEGFHV

SEQ ID NO: 31 - protein, 9 aa, synthetic construct
AAQSMVCDS

SEQ ID NO: 32 - protein, 9 aa, synthetic construct
AARDTMEGK

SEQ ID NO: 33 - protein, 9 aa, synthetic construct
AARIYLMYV

SEQ ID NO: 34 - protein, 9 aa, synthetic construct
AASYWGNMY

SEQ ID NO: 35 - protein, 9 aa, synthetic construct
AATMTNHAW

SEQ ID NO: 36 - protein, 9 aa, synthetic construct
AATQEYWQG

SEQ ID NO: 37 - protein, 9 aa, synthetic construct
AAVYGKFSW

SEQ ID NO: 38 - protein, 9 aa, synthetic construct
AAYLDDQYS

SEQ ID NO: 39 - protein, 9 aa, synthetic construct
AAYPCQLER

SEQ ID NO: 40 - protein, 9 aa, synthetic construct
AAYPYICAD

SEQ ID NO: 41 - protein, 9 aa, synthetic construct
ACGYFTYNV

SEQ ID NO: 42 - protein, 9 aa, synthetic construct
ACHTMVIEN

SEQ ID NO: 43 - protein, 9 aa, synthetic construct
ACIYKIAQE

SEQ ID NO: 44 - protein, 9 aa, synthetic construct
ACKFGQESD

SEQ ID NO: 45 - protein, 9 aa, synthetic construct
ACYQYKCRR

SEQ ID NO: 46 - protein, 9 aa, synthetic construct
ADAIRQPVL

SEQ ID NO: 47 - protein, 9 aa, synthetic construct
ADAMRQPVL

SEQ ID NO: 48 - protein, 9 aa, synthetic construct
ADAPVNASC

SEQ ID NO: 49 - protein, 9 aa, synthetic construct
ADSIKLTEY

SEQ ID NO: 50 - protein, 9 aa, synthetic construct
ADYTMDWHL

SEQ ID NO: 51 - protein, 9 aa, synthetic construct
AEAMMSAVF

SEQ ID NO: 52 - protein, 9 aa, synthetic construct
AEAQFQYWS

SEQ ID NO: 53 - protein, 9 aa, synthetic construct
AEDLSPVPV

SEQ ID NO: 54 - protein, 9 aa, synthetic construct
AEDYWDLGA

SEQ ID NO: 55 - protein, 9 aa, synthetic construct
AEIILPGMQ

SEQ ID NO: 56 - protein, 9 aa, synthetic construct
AEIYVHCQT

SEQ ID NO: 57 - protein, 9 aa, synthetic construct
AEIYVHWQT

SEQ ID NO: 58 - protein, 9 aa, synthetic construct
AEKLYGLST

SEQ ID NO: 59 - protein, 9 aa, synthetic construct
AEREHWFYC

SEQ ID NO: 60 - protein, 9 aa, synthetic construct
AFAQKCRYH

SEQ ID NO: 61 - protein, 9 aa, synthetic construct
AFAYELNIN

SEQ ID NO: 62 - protein, 9 aa, synthetic construct
AFCPISSGI

SEQ ID NO: 63 - protein, 9 aa, synthetic construct
AFEQWAHNE

SEQ ID NO: 64 - protein, 9 aa, synthetic construct
AFHAHEQAG

SEQ ID NO: 65 - protein, 9 aa, synthetic construct
AFHQVHSMG

SEQ ID NO: 66 - protein, 9 aa, synthetic construct
AFNDKPSCC

SEQ ID NO: 67 - protein, 9 aa, synthetic construct
AFQNACKSA

SEQ ID NO: 68 - protein, 9 aa, synthetic construct
AFTYGNHQF

SEQ ID NO: 69 - protein, 9 aa, synthetic construct
AGASTWMQS

SEQ ID NO: 70 - protein, 9 aa, synthetic construct
AGCSIQAWC

SEQ ID NO: 71 - protein, 9 aa, synthetic construct
AGIVQGIWG

SEQ ID NO: 72 - protein, 9 aa, synthetic construct
AGKCTPVTS

SEQ ID NO: 73 - protein, 9 aa, synthetic construct
AGKYYQDYQ

SEQ ID NO: 74 - protein, 9 aa, synthetic construct
AGMPWDGHC

SEQ ID NO: 75 - protein, 9 aa, synthetic construct
AGQREVPSD

SEQ ID NO: 76 - protein, 9 aa, synthetic construct
AHAMLDRNF

SEQ ID NO: 77 - protein, 9 aa, synthetic construct
AHATYNKPT

SEQ ID NO: 78 - protein, 9 aa, synthetic construct
AHDSASRCA

SEQ ID NO: 79 - protein, 9 aa, synthetic construct
AHDWTHICA

SEQ ID NO: 80 - protein, 9 aa, synthetic construct
AHGNSPTAY

SEQ ID NO: 81 - protein, 9 aa, synthetic construct
AHHLGTMGH

SEQ ID NO: 82 - protein, 9 aa, synthetic construct
AHKSPDKDV

SEQ ID NO: 83 - protein, 9 aa, synthetic construct
AHLHNQFMP

SEQ ID NO: 84 - protein, 9 aa, synthetic construct
AHLTPNLHE

SEQ ID NO: 85 - protein, 9 aa, synthetic construct
AHMDEFRSG

SEQ ID NO: 86 - protein, 9 aa, synthetic construct
AHMSTYWGF

SEQ ID NO: 87 - protein, 9 aa, synthetic construct
AHNPCMHHQ

SEQ ID NO: 88 - protein, 9 aa, synthetic construct
AHQTSWAWI

SEQ ID NO: 89 - protein, 9 aa, synthetic construct
AHSDLTGAI

SEQ ID NO: 90 - protein, 9 aa, synthetic construct
AHYQFQALM

SEQ ID NO: 91 - protein, 9 aa, synthetic construct
AICQQHSYA

SEQ ID NO: 92 - protein, 9 aa, synthetic construct
AIDQLSWHG

SEQ ID NO: 93 - protein, 9 aa, synthetic construct
AIEIFGACV

SEQ ID NO: 94 - protein, 9 aa, synthetic construct
AIEMTKYPW

SEQ ID NO: 95 - protein, 9 aa, synthetic construct
AILSIYPSG

SEQ ID NO: 96 - protein, 9 aa, synthetic construct
AILYQSAGE

SEQ ID NO: 97 - protein, 9 aa, synthetic construct
AIMHYHRFK

SEQ ID NO: 98 - protein, 9 aa, synthetic construct
AIQQCHAYA

SEQ ID NO: 99 - protein, 9 aa, synthetic construct
AIQWFQAPG

SEQ ID NO: 100 - protein, 9 aa, synthetic construct
AISYMQLEA

SEQ ID NO: 101 - protein, 9 aa, synthetic construct
AITPRMGMK

SEQ ID NO: 102 - protein, 9 aa, synthetic construct
AITSCICEK

SEQ ID NO: 103 - protein, 9 aa, synthetic construct
AIWGYGMNY

SEQ ID NO: 104 - protein, 9 aa, synthetic construct
AKAYCTSVD

SEQ ID NO: 105 - protein, 9 aa, synthetic construct
AKCEHDHCW

SEQ ID NO: 106 - protein, 9 aa, synthetic construct
AKDCVQSQA

SEQ ID NO: 107 - protein, 9 aa, synthetic construct
AKFVGVAAD

SEQ ID NO: 108 - protein, 9 aa, synthetic construct
AKIHGAWKA

SEQ ID NO: 109 - protein, 9 aa, synthetic construct
AKQHALMIE

SEQ ID NO: 110 - protein, 9 aa, synthetic construct
AKSTMPGYQ

SEQ ID NO: 111 - protein, 9 aa, synthetic construct
AKTFVMSFG

SEQ ID NO: 112 - protein, 9 aa, synthetic construct
AKTSLQIDP

SEQ ID NO: 113 - protein, 9 aa, synthetic construct
ALEASYGYF

SEQ ID NO: 114 - protein, 9 aa, synthetic construct
ALECGHLPY

SEQ ID NO: 115 - protein, 9 aa, synthetic construct
ALFYMNADF

SEQ ID NO: 116 - protein, 9 aa, synthetic construct
ALIQFGQSW

SEQ ID NO: 117 - protein, 9 aa, synthetic construct
ALKSHGCLT

SEQ ID NO: 118 - protein, 9 aa, synthetic construct
ALLNRTACW

SEQ ID NO: 119 - protein, 9 aa, synthetic construct
ALPHIQSEP

SEQ ID NO: 120 - protein, 9 aa, synthetic construct
ALPHIRSEP

SEQ ID NO: 121 - protein, 9 aa, synthetic construct
ALTNWGMSG

SEQ ID NO: 122 - protein, 9 aa, synthetic construct
ALWMFDVFG

SEQ ID NO: 123 - protein, 9 aa, synthetic construct
AMAQSMVQF

SEQ ID NO: 124 - protein, 9 aa, synthetic construct
AMDKIPVFQ

SEQ ID NO: 125 - protein, 9 aa, synthetic construct
AMDPPIREP

SEQ ID NO: 126 - protein, 9 aa, synthetic construct
AMDRIPIFQ

SEQ ID NO: 127 - protein, 9 aa, synthetic construct
AMEQVSATF

SEQ ID NO: 128 - protein, 9 aa, synthetic construct
AMFNGTSMS

SEQ ID NO: 129 - protein, 9 aa, synthetic construct
AMGIGMRID

SEQ ID NO: 130 - protein, 9 aa, synthetic construct
AMGPCNGPM

SEQ ID NO: 131 - protein, 9 aa, synthetic construct
AMGYNGTYP

SEQ ID NO: 132 - protein, 9 aa, synthetic construct
AMKWVEACP

SEQ ID NO: 133 - protein, 9 aa, synthetic construct
AMKWVEAWQ

SEQ ID NO: 134 - protein, 9 aa, synthetic construct
AMKYIGCPM

SEQ ID NO: 135 - protein, 9 aa, synthetic construct
AMLAYFATE

SEQ ID NO: 136 - protein, 9 aa, synthetic construct
AMLKNHCYH

SEQ ID NO: 137 - protein, 9 aa, synthetic construct
AMMLCIWVD

SEQ ID NO: 138 - protein, 9 aa, synthetic construct
AMMNMNVQF

SEQ ID NO: 139 - protein, 9 aa, synthetic construct
AMQCFPAQQ

SEQ ID NO: 140 - protein, 9 aa, synthetic construct
AMQCNQMQD

SEQ ID NO: 141 - protein, 9 aa, synthetic construct
AMQPTRIVG

SEQ ID NO: 142 - protein, 9 aa, synthetic construct
AMQPVRIVV

SEQ ID NO: 143 - protein, 9 aa, synthetic construct
AMRQIIAPC

SEQ ID NO: 144 - protein, 9 aa, synthetic construct
ANAVTEEWM

SEQ ID NO: 145 - protein, 9 aa, synthetic construct
ANGDKVAMD

SEQ ID NO: 146 - protein, 9 aa, synthetic construct
ANITIGPQA

SEQ ID NO: 147 - protein, 9 aa, synthetic construct
ANIYICPQA

SEQ ID NO: 148 - protein, 9 aa, synthetic construct
ANLDSHQFE

SEQ ID NO: 149 - protein, 9 aa, synthetic construct
ANMVAHMMA

SEQ ID NO: 150 - protein, 9 aa, synthetic construct
ANQHFHAES

SEQ ID NO: 151 - protein, 9 aa, synthetic construct
ANTRDNAEL

SEQ ID NO: 152 - protein, 9 aa, synthetic construct
ANTWLAHFE

SEQ ID NO: 153 - protein, 9 aa, synthetic construct
APCHDKDRE

SEQ ID NO: 154 - protein, 9 aa, synthetic construct
APIQGQMMM

SEQ ID NO: 155 - protein, 9 aa, synthetic construct
APKLVGLST

SEQ ID NO: 156 - protein, 9 aa, synthetic construct
AQCQDMWGH

SEQ ID NO: 157 - protein, 9 aa, synthetic construct
AQEPFKTIQ

SEQ ID NO: 158 - protein, 9 aa, synthetic construct
AQFRAIIGN

SEQ ID NO: 159 - protein, 9 aa, synthetic construct
AQGTMDSWY

SEQ ID NO: 160 - protein, 9 aa, synthetic construct
AQIQPAMFP

SEQ ID NO: 161 - protein, 9 aa, synthetic construct
AQMTVCARE

SEQ ID NO: 162 - protein, 9 aa, synthetic construct
AQMYWSSKD

SEQ ID NO: 163 - protein, 9 aa, synthetic construct
AQNNKFDGS

SEQ ID NO: 164 - protein, 9 aa, synthetic construct
AQSFLWKGC

SEQ ID NO: 165 - protein, 9 aa, synthetic construct
AQVLMEMCT

SEQ ID NO: 166 - protein, 9 aa, synthetic construct
AQYCTIMAH

SEQ ID NO: 167 - protein, 9 aa, synthetic construct
ARKFCEGTP

SEQ ID NO: 168 - protein, 9 aa, synthetic construct
ARQVYEMNG

SEQ ID NO: 169 - protein, 9 aa, synthetic construct
ARQWYEMTG

SEQ ID NO: 170 - protein, 9 aa, synthetic construct
ASEMTKGPW

SEQ ID NO: 171 - protein, 9 aa, synthetic construct
ASFMSWEGA

SEQ ID NO: 172 - protein, 9 aa, synthetic construct
ASGWAPCSW

SEQ ID NO: 173 - protein, 9 aa, synthetic construct
ASMQEHHYT

SEQ ID NO: 174 - protein, 9 aa, synthetic construct
ASQHFHAPQ

SEQ ID NO: 175 - protein, 9 aa, synthetic construct
ASQHNHEKQ

SEQ ID NO: 176 - protein, 9 aa, synthetic construct
ASQLIECNA

SEQ ID NO: 177 - protein, 9 aa, synthetic construct
ASQPRGAEQ

SEQ ID NO: 178 - protein, 9 aa, synthetic construct
ASQTTHGPL

SEQ ID NO: 179 - protein, 9 aa, synthetic construct
ASTERAKFG

SEQ ID NO: 180 - protein, 9 aa, synthetic construct
ASTQQGFWC

SEQ ID NO: 181 - protein, 9 aa, synthetic construct
ASVCEHTLE

SEQ ID NO: 182 - protein, 9 aa, synthetic construct
ASVECWQWT

SEQ ID NO: 183 - protein, 9 aa, synthetic construct
ASVPISHSQ

SEQ ID NO: 184 - protein, 9 aa, synthetic construct
ASWLCGRNV

SEQ ID NO: 185 - protein, 9 aa, synthetic construct
ASYNGCMIC

SEQ ID NO: 186 - protein, 9 aa, synthetic construct
ASYPSSQVF

SEQ ID NO: 187 - protein, 9 aa, synthetic construct
ASYSICDAG

SEQ ID NO: 188 - protein, 9 aa, synthetic construct
ATAGIPTAG

SEQ ID NO: 189 - protein, 9 aa, synthetic construct
ATAQFQMEG

SEQ ID NO: 190 - protein, 9 aa, synthetic construct
ATCTFNPGI

SEQ ID NO: 191 - protein, 9 aa, synthetic construct
ATCWVQMGQ

SEQ ID NO: 192 - protein, 9 aa, synthetic construct
ATEGYNMHC

SEQ ID NO: 193 - protein, 9 aa, synthetic construct
ATENYNRRG

SEQ ID NO: 194 - protein, 9 aa, synthetic construct
ATFMPNQSF

SEQ ID NO: 195 - protein, 9 aa, synthetic construct
ATGMRIAVC

SEQ ID NO: 196 - protein, 9 aa, synthetic construct
ATGMRIDVC

SEQ ID NO: 197 - protein, 9 aa, synthetic construct
ATGTYNIQE

SEQ ID NO: 198 - protein, 9 aa, synthetic construct
ATISKLECQ

SEQ ID NO: 199 - protein, 9 aa, synthetic construct
ATKTCAEGG

SEQ ID NO: 200 - protein, 9 aa, synthetic construct
ATLNSMHTQ

SEQ ID NO: 201 - protein, 9 aa, synthetic construct
ATMCHCVVA

SEQ ID NO: 202 - protein, 9 aa, synthetic construct
ATMWFTANG

SEQ ID NO: 203 - protein, 9 aa, synthetic construct
ATMWMQWWD

SEQ ID NO: 204 - protein, 9 aa, synthetic construct
ATMWVQAYG

SEQ ID NO: 205 - protein, 9 aa, synthetic construct
ATNQLNESF

SEQ ID NO: 206 - protein, 9 aa, synthetic construct
ATQGYNMHC

SEQ ID NO: 207 - protein, 9 aa, synthetic construct
ATQLYMHHK

SEQ ID NO: 208 - protein, 9 aa, synthetic construct
ATQMYMHCK

SEQ ID NO: 209 - protein, 9 aa, synthetic construct
ATTFSSASF

SEQ ID NO: 210 - protein, 9 aa, synthetic construct
ATTTVNRQE

SEQ ID NO: 211 - protein, 9 aa, synthetic construct
ATVDVKGAH

SEQ ID NO: 212 - protein, 9 aa, synthetic construct
ATVWSINAD

SEQ ID NO: 213 - protein, 9 aa, synthetic construct
ATWSADVTA

SEQ ID NO: 214 - protein, 9 aa, synthetic construct
AVDLTSKHS

SEQ ID NO: 215 - protein, 9 aa, synthetic construct
AVDPTKDGQ

SEQ ID NO: 216 - protein, 9 aa, synthetic construct
AVEQLNQPI

SEQ ID NO: 217 - protein, 9 aa, synthetic construct
AVGCSQHWK

SEQ ID NO: 218 - protein, 9 aa, synthetic construct
AVKCPESLI

SEQ ID NO: 219 - protein, 9 aa, synthetic construct
AVMPSHQIT

SEQ ID NO: 220 - protein, 9 aa, synthetic construct
AVNACSNSH

SEQ ID NO: 221 - protein, 9 aa, synthetic construct
AVNDCKMWE

SEQ ID NO: 222 - protein, 9 aa, synthetic construct
AVRIMFMQE

SEQ ID NO: 223 - protein, 9 aa, synthetic construct
AVSGCRGSA

SEQ ID NO: 224 - protein, 9 aa, synthetic construct
AVSNAMIAG

SEQ ID NO: 225 - protein, 9 aa, synthetic construct
AVSNWLETS

SEQ ID NO: 226 - protein, 9 aa, synthetic construct
AVSPSNFLA

SEQ ID NO: 227 - protein, 9 aa, synthetic construct
AWCCSSVGE

SEQ ID NO: 228 - protein, 9 aa, synthetic construct
AWFKTMPSD

SEQ ID NO: 229 - protein, 9 aa, synthetic construct
AWFSHHQFC

SEQ ID NO: 230 - protein, 9 aa, synthetic construct
AWHQTQDDM

SEQ ID NO: 231 - protein, 9 aa, synthetic construct
AWREQEWAH

SEQ ID NO: 232 - protein, 9 aa, synthetic construct
AWSEFQWFD

SEQ ID NO: 233 - protein, 9 aa, synthetic construct
AWTPLMSYN

SEQ ID NO: 234 - protein, 9 aa, synthetic construct
AWVPEGHFP

SEQ ID NO: 235 - protein, 9 aa, synthetic construct
AWYHTQDDM

SEQ ID NO: 236 - protein, 9 aa, synthetic construct
AYADMFQCK

SEQ ID NO: 237 - protein, 9 aa, synthetic construct
AYCLTNGPH

SEQ ID NO: 238 - protein, 9 aa, synthetic construct
AYCSKMRGE

SEQ ID NO: 239 - protein, 9 aa, synthetic construct
AYDFVGVQE

SEQ ID NO: 240 - protein, 9 aa, synthetic construct
AYFLLHASG

SEQ ID NO: 241 - protein, 9 aa, synthetic construct
AYGPFAMLY

SEQ ID NO: 242 - protein, 9 aa, synthetic construct
AYNAMHTAW

SEQ ID NO: 243 - protein, 9 aa, synthetic construct
AYNFKVGSD

SEQ ID NO: 244 - protein, 9 aa, synthetic construct
AYNIDYQPV

SEQ ID NO: 245 - protein, 9 aa, synthetic construct
AYNWQQTSA

SEQ ID NO: 246 - protein, 9 aa, synthetic construct
AYRCYACET

SEQ ID NO: 247 - protein, 9 aa, synthetic construct
AYRCYAVEQ

SEQ ID NO: 248 - protein, 9 aa, synthetic construct
CAARCYKAR

SEQ ID NO: 249 - protein, 9 aa, synthetic construct
CADFKNECA

SEQ ID NO: 250 - protein, 9 aa, synthetic construct
CADTAWQYT

SEQ ID NO: 251 - protein, 9 aa, synthetic construct
CAEPKRMEY

SEQ ID NO: 252 - protein, 9 aa, synthetic construct
CAEWRIMWS

SEQ ID NO: 253 - protein, 9 aa, synthetic construct
CAGFMQTCQ

SEQ ID NO: 254 - protein, 9 aa, synthetic construct
CAGGIVCHN

SEQ ID NO: 255 - protein, 9 aa, synthetic construct
CAGGTVHHN

SEQ ID NO: 256 - protein, 9 aa, synthetic construct
CAHSPHSHL

SEQ ID NO: 257 - protein, 9 aa, synthetic construct
CAHYAQWGK

SEQ ID NO: 258 - protein, 9 aa, synthetic construct
CAILAYAHH

SEQ ID NO: 259 - protein, 9 aa, synthetic construct
CAIYSGLHI

SEQ ID NO: 260 - protein, 9 aa, synthetic construct
CAMQCEHAE

SEQ ID NO: 261 - protein, 9 aa, synthetic construct
CANYWQDMG

SEQ ID NO: 262 - protein, 9 aa, synthetic construct
CATRFNIGG

SEQ ID NO: 263 - protein, 9 aa, synthetic construct
CCCTVEREC

SEQ ID NO: 264 - protein, 9 aa, synthetic construct
CCEEYACAE

SEQ ID NO: 265 - protein, 9 aa, synthetic construct
CCTPTECQM

SEQ ID NO: 266 - protein, 9 aa, synthetic construct
CCYPTHCQM

SEQ ID NO: 267 - protein, 9 aa, synthetic construct
CCYQLGLMP

SEQ ID NO: 268 - protein, 9 aa, synthetic construct
CDGSKSVGD

SEQ ID NO: 269 - protein, 9 aa, synthetic construct
CDLCIAACE

SEQ ID NO: 270 - protein, 9 aa, synthetic construct
CECRYFKFA

SEQ ID NO: 271 - protein, 9 aa, synthetic construct
CECSYFKHA

SEQ ID NO: 272 - protein, 9 aa, synthetic construct
CEKVQAHWM

SEQ ID NO: 273 - protein, 9 aa, synthetic construct
CETYTIHIP

SEQ ID NO: 274 - protein, 9 aa, synthetic construct
CEVDICNDR

SEQ ID NO: 275 - protein, 9 aa, synthetic construct
CFLLTNRIS

SEQ ID NO: 276 - protein, 9 aa, synthetic construct
CFTITQGEW

SEQ ID NO: 277 - protein, 9 aa, synthetic construct
CFWVRGMWN

SEQ ID NO: 278 - protein, 9 aa, synthetic construct
CGANYQRFG

SEQ ID NO: 279 - protein, 9 aa, synthetic construct
CGGTYFALP

SEQ ID NO: 280 - protein, 9 aa, synthetic construct
CGVNYQWFG

SEQ ID NO: 281 - protein, 9 aa, synthetic construct
CHAGFPAWP

SEQ ID NO: 282 - protein, 9 aa, synthetic construct
CHCKTDMWA

SEQ ID NO: 283 - protein, 9 aa, synthetic construct
CHHHYHTHL

SEQ ID NO: 284 - protein, 9 aa, synthetic construct
CHNVENCME

SEQ ID NO: 285 - protein, 9 aa, synthetic construct
CHVNLKAWW

SEQ ID NO: 286 - protein, 9 aa, synthetic construct
CIENMFVNS

SEQ ID NO: 287 - protein, 9 aa, synthetic construct
CIGNKSASG

SEQ ID NO: 288 - protein, 9 aa, synthetic construct
CIHECCDSG

SEQ ID NO: 289 - protein, 9 aa, synthetic construct
CIHSVHFAA

SEQ ID NO: 290 - protein, 9 aa, synthetic construct
CIKWYAAST

SEQ ID NO: 291 - protein, 9 aa, synthetic construct
CILPRGIGQ

SEQ ID NO: 292 - protein, 9 aa, synthetic construct
CILYLEEAQ

SEQ ID NO: 293 - protein, 9 aa, synthetic construct
CIMFRSATS

SEQ ID NO: 294 - protein, 9 aa, synthetic construct
CIMTRAATS

SEQ ID NO: 295 - protein, 9 aa, synthetic construct
CIRSKPDYN

SEQ ID NO: 296 - protein, 9 aa, synthetic construct
CISWGGNYG

SEQ ID NO: 297 - protein, 9 aa, synthetic construct
CIVQKGNMV

SEQ ID NO: 298 - protein, 9 aa, synthetic construct
CIYSKTGAG

SEQ ID NO: 299 - protein, 9 aa, synthetic construct
CKAHKQTMS

SEQ ID NO: 300 - protein, 9 aa, synthetic construct
CKELYPQAV

SEQ ID NO: 301 - protein, 9 aa, synthetic construct
CKKTTGVCY

SEQ ID NO: 302 - protein, 9 aa, synthetic construct
CKNPTGVCY

SEQ ID NO: 303 - protein, 9 aa, synthetic construct
CKQEQLKMP

SEQ ID NO: 304 - protein, 9 aa, synthetic construct
CLDHINSLS

SEQ ID NO: 305 - protein, 9 aa, synthetic construct
CLWIYSVMG

SEQ ID NO: 306 - protein, 9 aa, synthetic construct
CMCRVEQVA

SEQ ID NO: 307 - protein, 9 aa, synthetic construct
CMKVKQSQP

SEQ ID NO: 308 - protein, 9 aa, synthetic construct
CMMLMMTGQ

SEQ ID NO: 309 - protein, 9 aa, synthetic construct
CMWVMIHFE

SEQ ID NO: 310 - protein, 9 aa, synthetic construct
CMYNVSHWN

SEQ ID NO: 311 - protein, 9 aa, synthetic construct
CMYTGDGPM

SEQ ID NO: 312 - protein, 9 aa, synthetic construct
CNFSALPKH

SEQ ID NO: 313 - protein, 9 aa, synthetic construct
CNGHYTVIS

SEQ ID NO: 314 - protein, 9 aa, synthetic construct
CNGPNVSEI

SEQ ID NO: 315 - protein, 9 aa, synthetic construct
CNQTIRPII

SEQ ID NO: 316 - protein, 9 aa, synthetic construct
CNQTIRPIK

SEQ ID NO: 317 - protein, 9 aa, synthetic construct
CNSWYAAST

SEQ ID NO: 318 - protein, 9 aa, synthetic construct
CNVPRLVRH

SEQ ID NO: 319 - protein, 9 aa, synthetic construct
CPAKHAQAR

SEQ ID NO: 320 - protein, 9 aa, synthetic construct
CPESSSHQT

SEQ ID NO: 321 - protein, 9 aa, synthetic construct
CPKQANRSG

SEQ ID NO: 322 - protein, 9 aa, synthetic construct
CPTFWGHSE

SEQ ID NO: 323 - protein, 9 aa, synthetic construct
CPWFIKWGI

SEQ ID NO: 324 - protein, 9 aa, synthetic construct
CQAIVNRLN

SEQ ID NO: 325 - protein, 9 aa, synthetic construct
CQASHEHAH

SEQ ID NO: 326 - protein, 9 aa, synthetic construct
CQDAVGRSY

SEQ ID NO: 327 - protein, 9 aa, synthetic construct
CQDAVGRTF

SEQ ID NO: 328 - protein, 9 aa, synthetic construct
CQDCYHCDR

SEQ ID NO: 329 - protein, 9 aa, synthetic construct
CQEDMSSTY

SEQ ID NO: 330 - protein, 9 aa, synthetic construct
CQKWYESFG

SEQ ID NO: 331 - protein, 9 aa, synthetic construct
CQSCISDAG

SEQ ID NO: 332 - protein, 9 aa, synthetic construct
CQYLSFRTV

SEQ ID NO: 333 - protein, 9 aa, synthetic construct
CRGKSHDHT

SEQ ID NO: 334 - protein, 9 aa, synthetic construct
CSAAFQLQP

SEQ ID NO: 335 - protein, 9 aa, synthetic construct
CSALWGGCC

SEQ ID NO: 336 - protein, 9 aa, synthetic construct
CSAQIKAAC

SEQ ID NO: 337 - protein, 9 aa, synthetic construct
CSDVSTIYI

SEQ ID NO: 338 - protein, 9 aa, synthetic construct
CSFQEKAAC

SEQ ID NO: 339 - protein, 9 aa, synthetic construct
CSHETGAMC

SEQ ID NO: 340 - protein, 9 aa, synthetic construct
CSMDEYAMA

SEQ ID NO: 341 - protein, 9 aa, synthetic construct
CSMHMHYVE

SEQ ID NO: 342 - protein, 9 aa, synthetic construct
CSMTGVMFE

SEQ ID NO: 343 - protein, 9 aa, synthetic construct
CSRHDLNGD

SEQ ID NO: 344 - protein, 9 aa, synthetic construct
CSSGFHLFH

SEQ ID NO: 345 - protein, 9 aa, synthetic construct
CSTGFHCEQ

SEQ ID NO: 346 - protein, 9 aa, synthetic construct
CSTNCTANP

SEQ ID NO: 347 - protein, 9 aa, synthetic construct
CSVPGEQAF

SEQ ID NO: 348 - protein, 9 aa, synthetic construct
CTASWMSWD

SEQ ID NO: 349 - protein, 9 aa, synthetic construct
CTCQGTGFS

SEQ ID NO: 350 - protein, 9 aa, synthetic construct
CTCQGTGFT

SEQ ID NO: 351 - protein, 9 aa, synthetic construct
CTERTKCAS

SEQ ID NO: 352 - protein, 9 aa, synthetic construct
CTERTMNAS

SEQ ID NO: 353 - protein, 9 aa, synthetic construct
CTGIQWTGG

SEQ ID NO: 354 - protein, 9 aa, synthetic construct
CTHECNDSG

SEQ ID NO: 355 - protein, 9 aa, synthetic construct
CTHPGHQNQ

SEQ ID NO: 356 - protein, 9 aa, synthetic construct
CTHWFTSLT

SEQ ID NO: 357 - protein, 9 aa, synthetic construct
CTIAYASMA

SEQ ID NO: 358 - protein, 9 aa, synthetic construct
CTILATVHH

SEQ ID NO: 359 - protein, 9 aa, synthetic construct
CTNAYFMSE

SEQ ID NO: 360 - protein, 9 aa, synthetic construct
CTNTYFMSE

SEQ ID NO: 361 - protein, 9 aa, synthetic construct
CTQLKECWL

SEQ ID NO: 362 - protein, 9 aa, synthetic construct
CTTETQCRS

SEQ ID NO: 363 - protein, 9 aa, synthetic construct
CTTPHDCHF

SEQ ID NO: 364 - protein, 9 aa, synthetic construct
CTTPNLQVC

SEQ ID NO: 365 - protein, 9 aa, synthetic construct
CTTSHLIGC

SEQ ID NO: 366 - protein, 9 aa, synthetic construct
CTVKEMANH

SEQ ID NO: 367 - protein, 9 aa, synthetic construct
CTWWGHQSM

SEQ ID NO: 368 - protein, 9 aa, synthetic construct
CVDAKDHCE

SEQ ID NO: 369 - protein, 9 aa, synthetic construct
CVEWRIMWS

SEQ ID NO: 370 - protein, 9 aa, synthetic construct
CVHSKMAFH

SEQ ID NO: 371 - protein, 9 aa, synthetic construct
CVIDVKEAG

SEQ ID NO: 372 - protein, 9 aa, synthetic construct
CVMEYMDWG

SEQ ID NO: 373 - protein, 9 aa, synthetic construct
CVNPDDMAQ

SEQ ID NO: 374 - protein, 9 aa, synthetic construct
CVQQEMGGG

SEQ ID NO: 375 - protein, 9 aa, synthetic construct
CVSFDACFA

SEQ ID NO: 376 - protein, 9 aa, synthetic construct
CVSRAWDEK

SEQ ID NO: 377 - protein, 9 aa, synthetic construct
CVTPKMDLP

SEQ ID NO: 378 - protein, 9 aa, synthetic construct
CVTTKGDLP

SEQ ID NO: 379 - protein, 9 aa, synthetic construct
CVVPLTNYY

SEQ ID NO: 380 - protein, 9 aa, synthetic construct
CWDLVRDCK

SEQ ID NO: 381 - protein, 9 aa, synthetic construct
CWQFMTAHP

SEQ ID NO: 382 - protein, 9 aa, synthetic construct
CWQSEGAMM

SEQ ID NO: 383 - protein, 9 aa, synthetic construct
CWWNFGKDC

SEQ ID NO: 384 - protein, 9 aa, synthetic construct
CYMPFKMQH

SEQ ID NO: 385 - protein, 9 aa, synthetic construct
CYNSGDCDN

SEQ ID NO: 386 - protein, 9 aa, synthetic construct
CYQFWSQYS

SEQ ID NO: 387 - protein, 9 aa, synthetic construct
CYTEPSNKH

SEQ ID NO: 388 - protein, 9 aa, synthetic construct
CYWPMTNCT

SEQ ID NO: 389 - protein, 9 aa, synthetic construct
DACTNKSHM

SEQ ID NO: 390 - protein, 9 aa, synthetic construct
DADDSNIAW

SEQ ID NO: 391 - protein, 9 aa, synthetic construct
DADEYKLDC

SEQ ID NO: 392 - protein, 9 aa, synthetic construct
DAEVTMDAM

SEQ ID NO: 393 - protein, 9 aa, synthetic construct
DAFHMKQHC

SEQ ID NO: 394 - protein, 9 aa, synthetic construct
DAFQYPTIG

SEQ ID NO: 395 - protein, 9 aa, synthetic construct
DAGFTWINC

SEQ ID NO: 396 - protein, 9 aa, synthetic construct
DAGKFGVDI

SEQ ID NO: 397 - protein, 9 aa, synthetic construct
DAGWIMNNS

SEQ ID NO: 398 - protein, 9 aa, synthetic construct
DAGYSMTYH

SEQ ID NO: 399 - protein, 9 aa, synthetic construct
DAHHGSRCG

SEQ ID NO: 400 - protein, 9 aa, synthetic construct
DAHMYMVHQ

SEQ ID NO: 401 - protein, 9 aa, synthetic construct
DAHVAFTDC

SEQ ID NO: 402 - protein, 9 aa, synthetic construct
DAIHFNMKD

SEQ ID NO: 403 - protein, 9 aa, synthetic construct
DAITVCAQE

SEQ ID NO: 404 - protein, 9 aa, synthetic construct
DAIWYGRLG

SEQ ID NO: 405 - protein, 9 aa, synthetic construct
DALHIGRSG

SEQ ID NO: 406 - protein, 9 aa, synthetic construct
DAMGYLKGG

SEQ ID NO: 407 - protein, 9 aa, synthetic construct
DAMQKHSAE

SEQ ID NO: 408 - protein, 9 aa, synthetic construct
DANLYHPME

SEQ ID NO: 409 - protein, 9 aa, synthetic construct
DANMQPVTF

SEQ ID NO: 410 - protein, 9 aa, synthetic construct
DAPLIPQWG

SEQ ID NO: 411 - protein, 9 aa, synthetic construct
DAQCRNTDG

SEQ ID NO: 412 - protein, 9 aa, synthetic construct
DAQGIELFT

SEQ ID NO: 413 - protein, 9 aa, synthetic construct
DAQLLMQAD

SEQ ID NO: 414 - protein, 9 aa, synthetic construct
DAQLSTSYW

SEQ ID NO: 415 - protein, 9 aa, synthetic construct
DARVYRALD

SEQ ID NO: 416 - protein, 9 aa, synthetic construct
DASCATLWS

SEQ ID NO: 417 - protein, 9 aa, synthetic construct
DASCATPWS

SEQ ID NO: 418 - protein, 9 aa, synthetic construct
DASHVKSIE

SEQ ID NO: 419 - protein, 9 aa, synthetic construct
DASIGAGPF

SEQ ID NO: 420 - protein, 9 aa, synthetic construct
DASIMMEMG

SEQ ID NO: 421 - protein, 9 aa, synthetic construct
DASIVWTID

SEQ ID NO: 422 - protein, 9 aa, synthetic construct
DASTQCYMS

SEQ ID NO: 423 - protein, 9 aa, synthetic construct
DATWEHIRL

SEQ ID NO: 424 - protein, 9 aa, synthetic construct
DAWCFISSY

SEQ ID NO: 425 - protein, 9 aa, synthetic construct
DAWLQLKDN

SEQ ID NO: 426 - protein, 9 aa, synthetic construct
DAWMMMWGS

SEQ ID NO: 427 - protein, 9 aa, synthetic construct
DAWQMKEAL

SEQ ID NO: 428 - protein, 9 aa, synthetic construct
DAWQMLSGN

SEQ ID NO: 429 - protein, 9 aa, synthetic construct
DAWSVLQDK

SEQ ID NO: 430 - protein, 9 aa, synthetic construct
DAWSYQCYH

SEQ ID NO: 431 - protein, 9 aa, synthetic construct
DAWYSKSQQ

SEQ ID NO: 432 - protein, 9 aa, synthetic construct
DAYACSSSF

SEQ ID NO: 433 - protein, 9 aa, synthetic construct
DAYPSNIAW

SEQ ID NO: 434 - protein, 9 aa, synthetic construct
DCDAWHANV

SEQ ID NO: 435 - protein, 9 aa, synthetic construct
DCDIGWGCF

SEQ ID NO: 436 - protein, 9 aa, synthetic construct
DCHQSPVFY

SEQ ID NO: 437 - protein, 9 aa, synthetic construct
DCMRNTVFE

SEQ ID NO: 438 - protein, 9 aa, synthetic construct
DCMWMQNGL

SEQ ID NO: 439 - protein, 9 aa, synthetic construct
DCNFDCPGA

SEQ ID NO: 440 - protein, 9 aa, synthetic construct
DCQGQHRVC

SEQ ID NO: 441 - protein, 9 aa, synthetic construct
DCQQILWDA

SEQ ID NO: 442 - protein, 9 aa, synthetic construct
DCRTLEEFI

SEQ ID NO: 443 - protein, 9 aa, synthetic construct
DCSWQTMAF

SEQ ID NO: 444 - protein, 9 aa, synthetic construct
DCVVPMPWP

SEQ ID NO: 445 - protein, 9 aa, synthetic construct
DEMKFNRDD

SEQ ID NO: 446 - protein, 9 aa, synthetic construct
DFAACNSGF

SEQ ID NO: 447 - protein, 9 aa, synthetic construct
DFACHNNFT

SEQ ID NO: 448 - protein, 9 aa, synthetic construct
DFAHHSTGV

SEQ ID NO: 449 - protein, 9 aa, synthetic construct
DFASCDICS

SEQ ID NO: 450 - protein, 9 aa, synthetic construct
DFASFNDCS

SEQ ID NO: 451 - protein, 9 aa, synthetic construct
DFAYHSTGV

SEQ ID NO: 452 - protein, 9 aa, synthetic construct
DFDPWFITT

SEQ ID NO: 453 - protein, 9 aa, synthetic construct
DFELQDTSF

SEQ ID NO: 454 - protein, 9 aa, synthetic construct
DFEYSGQLG

SEQ ID NO: 455 - protein, 9 aa, synthetic construct
DFEYSHDWN

SEQ ID NO: 456 - protein, 9 aa, synthetic construct
DFGGVMGTA

SEQ ID NO: 457 - protein, 9 aa, synthetic construct
DFHTMHQFE

SEQ ID NO: 458 - protein, 9 aa, synthetic construct
DFIHNCHCD

SEQ ID NO: 459 - protein, 9 aa, synthetic construct
DFINMPYWS

SEQ ID NO: 460 - protein, 9 aa, synthetic construct
DFMQNSVHY

SEQ ID NO: 461 - protein, 9 aa, synthetic construct
DFRHVRRSL

SEQ ID NO: 462 - protein, 9 aa, synthetic construct
DFSQHKMHQ

SEQ ID NO: 463 - protein, 9 aa, synthetic construct
DFSVTSHMG

SEQ ID NO: 464 - protein, 9 aa, synthetic construct
DFVTNPNYE

SEQ ID NO: 465 - protein, 9 aa, synthetic construct
DFYTFSFEN

SEQ ID NO: 466 - protein, 9 aa, synthetic construct
DGAVYVKQD

SEQ ID NO: 467 - protein, 9 aa, synthetic construct
DGDAKLVDG

SEQ ID NO: 468 - protein, 9 aa, synthetic construct
DGGWFMQGE

SEQ ID NO: 469 - protein, 9 aa, synthetic construct
DGIVQGVWG

SEQ ID NO: 470 - protein, 9 aa, synthetic construct
DGKLQSTCI

SEQ ID NO: 471 - protein, 9 aa, synthetic construct
DGKLQSTCM

SEQ ID NO: 472 - protein, 9 aa, synthetic construct
DGQPYMTYS

SEQ ID NO: 473 - protein, 9 aa, synthetic construct
DGSFVQMTQ

SEQ ID NO: 474 - protein, 9 aa, synthetic construct
DGYMCMSGG

SEQ ID NO: 475 - protein, 9 aa, synthetic construct
DHCSMCCGN

SEQ ID NO: 476 - protein, 9 aa, synthetic construct
DHKHNVIYP

SEQ ID NO: 477 - protein, 9 aa, synthetic construct
DHMQWGKFD

SEQ ID NO: 478 - protein, 9 aa, synthetic construct
DHRHSFMGF

SEQ ID NO: 479 - protein, 9 aa, synthetic construct
DHVMLRMIN

SEQ ID NO: 480 - protein, 9 aa, synthetic construct
DHWYFLYHG

SEQ ID NO: 481 - protein, 9 aa, synthetic construct
DICEGPKQY

SEQ ID NO: 482 - protein, 9 aa, synthetic construct
DICQVIDNE

SEQ ID NO: 483 - protein, 9 aa, synthetic construct
DICSDSWKV

SEQ ID NO: 484 - protein, 9 aa, synthetic construct
DIDSFMHCL

SEQ ID NO: 485 - protein, 9 aa, synthetic construct
DIGFMDTRA

SEQ ID NO: 486 - protein, 9 aa, synthetic construct
DIICFNWQV

SEQ ID NO: 487 - protein, 9 aa, synthetic construct
DIKCERDAD

SEQ ID NO: 488 - protein, 9 aa, synthetic construct
DIMRLSWPI

SEQ ID NO: 489 - protein, 9 aa, synthetic construct
DIQLYWMNQ

SEQ ID NO: 490 - protein, 9 aa, synthetic construct
DIREMMCKN

SEQ ID NO: 491 - protein, 9 aa, synthetic construct
DIRRAFAHC

SEQ ID NO: 492 - protein, 9 aa, synthetic construct
DISFGEYNP

SEQ ID NO: 493 - protein, 9 aa, synthetic construct
DISSMYWWH

SEQ ID NO: 494 - protein, 9 aa, synthetic construct
DISWGGLME

SEQ ID NO: 495 - protein, 9 aa, synthetic construct
DISYFLYHG

SEQ ID NO: 496 - protein, 9 aa, synthetic construct
DIWIQMVNT

SEQ ID NO: 497 - protein, 9 aa, synthetic construct
DKCCDTGLS

SEQ ID NO: 498 - protein, 9 aa, synthetic construct
DKCYMTSSF

SEQ ID NO: 499 - protein, 9 aa, synthetic construct
DKFPTHFSD

SEQ ID NO: 500 - protein, 9 aa, synthetic construct
DKHEMVNVG

SEQ ID NO: 501 - protein, 9 aa, synthetic construct
DKIFTIACP

SEQ ID NO: 502 - protein, 9 aa, synthetic construct
DKIFYGACP

SEQ ID NO: 503 - protein, 9 aa, synthetic construct
DKLPKVCDW

SEQ ID NO: 504 - protein, 9 aa, synthetic construct
DKLTQSAYQ

SEQ ID NO: 505 - protein, 9 aa, synthetic construct
DKLVYTQDR

SEQ ID NO: 506 - protein, 9 aa, synthetic construct
DKNATAIWE

SEQ ID NO: 507 - protein, 9 aa, synthetic construct
DKQFANHFT

SEQ ID NO: 508 - protein, 9 aa, synthetic construct
DKQWAHHSM

SEQ ID NO: 509 - protein, 9 aa, synthetic construct
DKRICHLNY

SEQ ID NO: 510 - protein, 9 aa, synthetic construct
DKTVQSLAL

SEQ ID NO: 511 - protein, 9 aa, synthetic construct
DKVAVDPYR

SEQ ID NO: 512 - protein, 9 aa, synthetic construct
DKYMFQRDG

SEQ ID NO: 513 - protein, 9 aa, synthetic construct
DKYMFWRDE

SEQ ID NO: 514 - protein, 9 aa, synthetic construct
DLEPITTQA

SEQ ID NO: 515 - protein, 9 aa, synthetic construct
DLFAIKQMW

SEQ ID NO: 516 - protein, 9 aa, synthetic construct
DLGPISSWM

SEQ ID NO: 517 - protein, 9 aa, synthetic construct
DLHRFDADY

SEQ ID NO: 518 - protein, 9 aa, synthetic construct
DLIVKKSTG

SEQ ID NO: 519 - protein, 9 aa, synthetic construct
DLIWNHLRT

SEQ ID NO: 520 - protein, 9 aa, synthetic construct
DLLGIINGG

SEQ ID NO: 521 - protein, 9 aa, synthetic construct
DLQYRLCQQ

SEQ ID NO: 522 - protein, 9 aa, synthetic construct
DLYGQPNYC

SEQ ID NO: 523 - protein, 9 aa, synthetic construct
DLYIMSDAN

SEQ ID NO: 524 - protein, 9 aa, synthetic construct
DMCEQNNMQ

SEQ ID NO: 525 - protein, 9 aa, synthetic construct
DMCVQNNGQ

SEQ ID NO: 526 - protein, 9 aa, synthetic construct
DMEGCCGCA

SEQ ID NO: 527 - protein, 9 aa, synthetic construct
DMHMKDMDS

SEQ ID NO: 528 - protein, 9 aa, synthetic construct
DMHRFDADY

SEQ ID NO: 529 - protein, 9 aa, synthetic construct
DMLPNNEWP

SEQ ID NO: 530 - protein, 9 aa, synthetic construct
DMTEWNFLF

SEQ ID NO: 531 - protein, 9 aa, synthetic construct
DMVFNNEWP

SEQ ID NO: 532 - protein, 9 aa, synthetic construct
DMVMPEMYG

SEQ ID NO: 533 - protein, 9 aa, synthetic construct
DNADLHHEC

SEQ ID NO: 534 - protein, 9 aa, synthetic construct
DNCSDGWKV

SEQ ID NO: 535 - protein, 9 aa, synthetic construct
DNKCYHMLM

SEQ ID NO: 536 - protein, 9 aa, synthetic construct
DNKCYSMAM

SEQ ID NO: 537 - protein, 9 aa, synthetic construct
DNMYPECMQ

SEQ ID NO: 538 - protein, 9 aa, synthetic construct
DNRMWYMCG

SEQ ID NO: 539 - protein, 9 aa, synthetic construct
DNRMWYMYG

SEQ ID NO: 540 - protein, 9 aa, synthetic construct
DNVHPDSQA

SEQ ID NO: 541 - protein, 9 aa, synthetic construct
DNVHRDCQA

SEQ ID NO: 542 - protein, 9 aa, synthetic construct
DNVQISDAE

SEQ ID NO: 543 - protein, 9 aa, synthetic construct
DPEFMAHCE

SEQ ID NO: 544 - protein, 9 aa, synthetic construct
DPEFMTHCE

SEQ ID NO: 545 - protein, 9 aa, synthetic construct
DPHQLPKKS

SEQ ID NO: 546 - protein, 9 aa, synthetic construct
DQGSFNMCR

SEQ ID NO: 547 - protein, 9 aa, synthetic construct
DQLICNMNE

SEQ ID NO: 548 - protein, 9 aa, synthetic construct
DQLNPGVQA

SEQ ID NO: 549 - protein, 9 aa, synthetic construct
DQLPVQYSL

SEQ ID NO: 550 - protein, 9 aa, synthetic construct
DQMFHQFVT

SEQ ID NO: 551 - protein, 9 aa, synthetic construct
DQMPYETNA

SEQ ID NO: 552 - protein, 9 aa, synthetic construct
DQNINIHTS

SEQ ID NO: 553 - protein, 9 aa, synthetic construct
DQQKLECYH

SEQ ID NO: 554 - protein, 9 aa, synthetic construct
DQQSIGDHE

SEQ ID NO: 555 - protein, 9 aa, synthetic construct
DQSLVDSQY

SEQ ID NO: 556 - protein, 9 aa, synthetic construct
DQTMESGKT

SEQ ID NO: 557 - protein, 9 aa, synthetic construct
DQTMFCAWC

SEQ ID NO: 558 - protein, 9 aa, synthetic construct
DRAQESMGP

SEQ ID NO: 559 - protein, 9 aa, synthetic construct
DRCWMPYRN

SEQ ID NO: 560 - protein, 9 aa, synthetic construct
DREIYAHWD

SEQ ID NO: 561 - protein, 9 aa, synthetic construct
DRENAMFFG

SEQ ID NO: 562 - protein, 9 aa, synthetic construct
DRMQKNSAE

SEQ ID NO: 563 - protein, 9 aa, synthetic construct
DRMWIDIAS

SEQ ID NO: 564 - protein, 9 aa, synthetic construct
DRNVCNVCH

SEQ ID NO: 565 - protein, 9 aa, synthetic construct
DRSGNWLWA

SEQ ID NO: 566 - protein, 9 aa, synthetic construct
DRSQSWLWA

SEQ ID NO: 567 - protein, 9 aa, synthetic construct
DRYYMDALM

SEQ ID NO: 568 - protein, 9 aa, synthetic construct
DSAFYDRDN

SEQ ID NO: 569 - protein, 9 aa, synthetic construct
DSASPIMGM

SEQ ID NO: 570 - protein, 9 aa, synthetic construct
DSDCYTLDC

SEQ ID NO: 571 - protein, 9 aa, synthetic construct
DSDIQFGIG

SEQ ID NO: 572 - protein, 9 aa, synthetic construct
DSDYFRQMD

SEQ ID NO: 573 - protein, 9 aa, synthetic construct
DSEETDYYQ

SEQ ID NO: 574 - protein, 9 aa, synthetic construct
DSFFYNFGA

SEQ ID NO: 575 - protein, 9 aa, synthetic construct
DSFILEAMC

SEQ ID NO: 576 - protein, 9 aa, synthetic construct
DSGQNQQAG

SEQ ID NO: 577 - protein, 9 aa, synthetic construct
DSHINWFCD

SEQ ID NO: 578 - protein, 9 aa, synthetic construct
DSHLSFECR

SEQ ID NO: 579 - protein, 9 aa, synthetic construct
DSHTWVADR

SEQ ID NO: 580 - protein, 9 aa, synthetic construct
DSKHQMCID

SEQ ID NO: 581 - protein, 9 aa, synthetic construct
DSKPMYHSD

SEQ ID NO: 582 - protein, 9 aa, synthetic construct
DSKPSVCQE

SEQ ID NO: 583 - protein, 9 aa, synthetic construct
DSKPWYHVD

SEQ ID NO: 584 - protein, 9 aa, synthetic construct
DSMCEHHYY

SEQ ID NO: 585 - protein, 9 aa, synthetic construct
DSNLDMHGC

SEQ ID NO: 586 - protein, 9 aa, synthetic construct
DSPEQMIRH

SEQ ID NO: 587 - protein, 9 aa, synthetic construct
DSQCVNHEE

SEQ ID NO: 588 - protein, 9 aa, synthetic construct
DSQFIGQGE

SEQ ID NO: 589 - protein, 9 aa, synthetic construct
DSQHVCGVN

SEQ ID NO: 590 - protein, 9 aa, synthetic construct
DSQPASEVG

SEQ ID NO: 591 - protein, 9 aa, synthetic construct
DSRFKSEWN

SEQ ID NO: 592 - protein, 9 aa, synthetic construct
DSRPESTVG

SEQ ID NO: 593 - protein, 9 aa, synthetic construct
DSRPFYGSV

SEQ ID NO: 594 - protein, 9 aa, synthetic construct
DSRPKSTNG

SEQ ID NO: 595 - protein, 9 aa, synthetic construct
DSSPFFWHS

SEQ ID NO: 596 - protein, 9 aa, synthetic construct
DSSYFHCCD

SEQ ID NO: 597 - protein, 9 aa, synthetic construct
DSVNSMQCT

SEQ ID NO: 598 - protein, 9 aa, synthetic construct
DSYCCVSTH

SEQ ID NO: 599 - protein, 9 aa, synthetic construct
DSYTTWLDD

SEQ ID NO: 600 - protein, 9 aa, synthetic construct
DTCCFVANP

SEQ ID NO: 601 - protein, 9 aa, synthetic construct
DTCNSMQCT

SEQ ID NO: 602 - protein, 9 aa, synthetic construct
DTCVMYTQD

SEQ ID NO: 603 - protein, 9 aa, synthetic construct
DTDYNHNSA

SEQ ID NO: 604 - protein, 9 aa, synthetic construct
DTFTGIMHQ

SEQ ID NO: 605 - protein, 9 aa, synthetic construct
DTGKPITTA

SEQ ID NO: 606 - protein, 9 aa, synthetic construct
DTHHTHWQY

SEQ ID NO: 607 - protein, 9 aa, synthetic construct
DTHIFIRHA

SEQ ID NO: 608 - protein, 9 aa, synthetic construct
DTHKYTENR

SEQ ID NO: 609 - protein, 9 aa, synthetic construct
DTHLQMQVI

SEQ ID NO: 610 - protein, 9 aa, synthetic construct
DTITFKQQH

SEQ ID NO: 611 - protein, 9 aa, synthetic construct
DTMNHRMTP

SEQ ID NO: 612 - protein, 9 aa, synthetic construct
DTMPTFSTM

SEQ ID NO: 613 - protein, 9 aa, synthetic construct
DTMQQVKFN

SEQ ID NO: 614 - protein, 9 aa, synthetic construct
DTPLCNILC

SEQ ID NO: 615 - protein, 9 aa, synthetic construct
DTQQYWMQD

SEQ ID NO: 616 - protein, 9 aa, synthetic construct
DTRCWNHNA

SEQ ID NO: 617 - protein, 9 aa, synthetic construct
DTRCWNVNC

SEQ ID NO: 618 - protein, 9 aa, synthetic construct
DTRDCNFFN

SEQ ID NO: 619 - protein, 9 aa, synthetic construct
DTTDCKKAS

SEQ ID NO: 620 - protein, 9 aa, synthetic construct
DVAELKSLF

SEQ ID NO: 621 - protein, 9 aa, synthetic construct
DVAHMQWRG

SEQ ID NO: 622 - protein, 9 aa, synthetic construct
DVAKFMQML

SEQ ID NO: 623 - protein, 9 aa, synthetic construct
DVALKNMFS

SEQ ID NO: 624 - protein, 9 aa, synthetic construct
DVAVKKEYE

SEQ ID NO: 625 - protein, 9 aa, synthetic construct
DVCAFRLMN

SEQ ID NO: 626 - protein, 9 aa, synthetic construct
DVCCWTLAP

SEQ ID NO: 627 - protein, 9 aa, synthetic construct
DVCDEHILY

SEQ ID NO: 628 - protein, 9 aa, synthetic construct
DVCERMGFT

SEQ ID NO: 629 - protein, 9 aa, synthetic construct
DVCNFMYSG

SEQ ID NO: 630 - protein, 9 aa, synthetic construct
DVCRKNVSD

SEQ ID NO: 631 - protein, 9 aa, synthetic construct
DVDFNELCE

SEQ ID NO: 632 - protein, 9 aa, synthetic construct
DVDHPCMMF

SEQ ID NO: 633 - protein, 9 aa, synthetic construct
DVDLNELCP

SEQ ID NO: 634 - protein, 9 aa, synthetic construct
DVFSWHKDQ

SEQ ID NO: 635 - protein, 9 aa, synthetic construct
DVHDSQLCY

SEQ ID NO: 636 - protein, 9 aa, synthetic construct
DVIHTTHSG

SEQ ID NO: 637 - protein, 9 aa, synthetic construct
DVKMKLSEQ

SEQ ID NO: 638 - protein, 9 aa, synthetic construct
DVLIATMTC

SEQ ID NO: 639 - protein, 9 aa, synthetic construct
DVLISTMAC

SEQ ID NO: 640 - protein, 9 aa, synthetic construct
DVNKHSFNG

SEQ ID NO: 641 - protein, 9 aa, synthetic construct
DVVKPTLMQ

SEQ ID NO: 642 - protein, 9 aa, synthetic construct
DVVTPKLMQ

SEQ ID NO: 643 - protein, 9 aa, synthetic construct
DVWLMRMCA

SEQ ID NO: 644 - protein, 9 aa, synthetic construct
DVYFIRNAE

SEQ ID NO: 645 - protein, 9 aa, synthetic construct
DWAEKVWGF

SEQ ID NO: 646 - protein, 9 aa, synthetic construct
DWCEMKVGD

SEQ ID NO: 647 - protein, 9 aa, synthetic construct
DWFMAFCGH

SEQ ID NO: 648 - protein, 9 aa, synthetic construct
DWFQAIIHA

SEQ ID NO: 649 - protein, 9 aa, synthetic construct
DWGFWMKHE

SEQ ID NO: 650 - protein, 9 aa, synthetic construct
DWKFNLKDE

SEQ ID NO: 651 - protein, 9 aa, synthetic construct
DWKPSVCQC

SEQ ID NO: 652 - protein, 9 aa, synthetic construct
DWMLHADLL

SEQ ID NO: 653 - protein, 9 aa, synthetic construct
DWRTFQAIA

SEQ ID NO: 654 - protein, 9 aa, synthetic construct
DWRTPQAIA

SEQ ID NO: 655 - protein, 9 aa, synthetic construct
DWVPEGHFP

SEQ ID NO: 656 - protein, 9 aa, synthetic construct
DYAIENSAF

SEQ ID NO: 657 - protein, 9 aa, synthetic construct
DYDHLDTWT

SEQ ID NO: 658 - protein, 9 aa, synthetic construct
DYDSIQRQE

SEQ ID NO: 659 - protein, 9 aa, synthetic construct
DYHPWWVTS

SEQ ID NO: 660 - protein, 9 aa, synthetic construct
DYILPVIAI

SEQ ID NO: 661 - protein, 9 aa, synthetic construct
DYILPVTAM

SEQ ID NO: 662 - protein, 9 aa, synthetic construct
DYLSQFFGI

SEQ ID NO: 663 - protein, 9 aa, synthetic construct
DYLWMNQEK

SEQ ID NO: 664 - protein, 9 aa, synthetic construct
DYNRNNRYL

SEQ ID NO: 665 - protein, 9 aa, synthetic construct
DYQPLSCYP

SEQ ID NO: 666 - protein, 9 aa, synthetic construct
DYQTMTEHE

SEQ ID NO: 667 - protein, 9 aa, synthetic construct
DYRDSHVAG

SEQ ID NO: 668 - protein, 9 aa, synthetic construct
DYSPIDCEQ

SEQ ID NO: 669 - protein, 9 aa, synthetic construct
DYSYRHIGE

SEQ ID NO: 670 - protein, 9 aa, synthetic construct
DYTGMHQNM

SEQ ID NO: 671 - protein, 9 aa, synthetic construct
DYTMMHQNC

SEQ ID NO: 672 - protein, 9 aa, synthetic construct
DYTTNCMVE

SEQ ID NO: 673 - protein, 9 aa, synthetic construct
DYVSLINEI

SEQ ID NO: 674 - protein, 9 aa, synthetic construct
DYVYTNAEA

SEQ ID NO: 675 - protein, 9 aa, synthetic construct
DYWLMHKID

SEQ ID NO: 676 - protein, 9 aa, synthetic construct
EACFKDFWF

SEQ ID NO: 677 - protein, 9 aa, synthetic construct
EACGMMTYC

SEQ ID NO: 678 - protein, 9 aa, synthetic construct
EACGMTTMC

SEQ ID NO: 679 - protein, 9 aa, synthetic construct
EACHPDLTP

SEQ ID NO: 680 - protein, 9 aa, synthetic construct
EACMVNAAF

SEQ ID NO: 681 - protein, 9 aa, synthetic construct
EACYWGHCP

SEQ ID NO: 682 - protein, 9 aa, synthetic construct
EADEWWTIL

SEQ ID NO: 683 - protein, 9 aa, synthetic construct
EADSRANAQ

SEQ ID NO: 684 - protein, 9 aa, synthetic construct
EAEHMNWLM

SEQ ID NO: 685 - protein, 9 aa, synthetic construct
EAEPFKTIQ

SEQ ID NO: 686 - protein, 9 aa, synthetic construct
EAFNAFAGE

SEQ ID NO: 687 - protein, 9 aa, synthetic construct
EAFNAFATR

SEQ ID NO: 688 - protein, 9 aa, synthetic construct
EAFVHYCIN

SEQ ID NO: 689 - protein, 9 aa, synthetic construct
EAGSCAMRV

SEQ ID NO: 690 - protein, 9 aa, synthetic construct
EAHDDEYQC

SEQ ID NO: 691 - protein, 9 aa, synthetic construct
EAHTNSICK

SEQ ID NO: 692 - protein, 9 aa, synthetic construct
EAIPHIMDM

SEQ ID NO: 693 - protein, 9 aa, synthetic construct
EAITDMYQP

SEQ ID NO: 694 - protein, 9 aa, synthetic construct
EAITQFAVI

SEQ ID NO: 695 - protein, 9 aa, synthetic construct
EAKWKECPS

SEQ ID NO: 696 - protein, 9 aa, synthetic construct
EAMEQPYMF

SEQ ID NO: 697 - protein, 9 aa, synthetic construct
EAMGYQAVE

SEQ ID NO: 698 - protein, 9 aa, synthetic construct
EAMPVQKGW

SEQ ID NO: 699 - protein, 9 aa, synthetic construct
EANVREHFC

SEQ ID NO: 700 - protein, 9 aa, synthetic construct
EARTTRDCG

SEQ ID NO: 701 - protein, 9 aa, synthetic construct
EARYSEEVW

SEQ ID NO: 702 - protein, 9 aa, synthetic construct
EASMPYASM

SEQ ID NO: 703 - protein, 9 aa, synthetic construct
EASWKMCPS

SEQ ID NO: 704 - protein, 9 aa, synthetic construct
EATWLQRIM

SEQ ID NO: 705 - protein, 9 aa, synthetic construct
EAVMWTCNS

SEQ ID NO: 706 - protein, 9 aa, synthetic construct
EAWFYHADD

SEQ ID NO: 707 - protein, 9 aa, synthetic construct
EAWMPSASG

SEQ ID NO: 708 - protein, 9 aa, synthetic construct
EAWMYHQFH

SEQ ID NO: 709 - protein, 9 aa, synthetic construct
EAWSKLEQP

SEQ ID NO: 710 - protein, 9 aa, synthetic construct
EAWSMLDAL

SEQ ID NO: 711 - protein, 9 aa, synthetic construct
EAWWYNFYF

SEQ ID NO: 712 - protein, 9 aa, synthetic construct
EAYLYNIPM

SEQ ID NO: 713 - protein, 9 aa, synthetic construct
ECDCGHVHL

SEQ ID NO: 714 - protein, 9 aa, synthetic construct
ECHPYKTVA

SEQ ID NO: 715 - protein, 9 aa, synthetic construct
ECLARQRHV

SEQ ID NO: 716 - protein, 9 aa, synthetic construct
ECTQYVMCN

SEQ ID NO: 717 - protein, 9 aa, synthetic construct
ECTWNMDAW

SEQ ID NO: 718 - protein, 9 aa, synthetic construct
ECVSHIPGK

SEQ ID NO: 719 - protein, 9 aa, synthetic construct
ECWSYQMVD

SEQ ID NO: 720 - protein, 9 aa, synthetic construct
EDEQHLWND

SEQ ID NO: 721 - protein, 9 aa, synthetic construct
EEDPLNGWQ

SEQ ID NO: 722 - protein, 9 aa, synthetic construct
EEEPIWWQV

SEQ ID NO: 723 - protein, 9 aa, synthetic construct
EEEWIWWQC

SEQ ID NO: 724 - protein, 9 aa, synthetic construct
EEEWLNGWQ

SEQ ID NO: 725 - protein, 9 aa, synthetic construct
EELETWIPY

SEQ ID NO: 726 - protein, 9 aa, synthetic construct
EEMADGDAQ

SEQ ID NO: 727 - protein, 9 aa, synthetic construct
EEMADGDAR

SEQ ID NO: 728 - protein, 9 aa, synthetic construct
EEMEGLASE

SEQ ID NO: 729 - protein, 9 aa, synthetic construct
EEPWQCMTA

SEQ ID NO: 730 - protein, 9 aa, synthetic construct
EFDTTPCLF

SEQ ID NO: 731 - protein, 9 aa, synthetic construct
EFEHGNAAS

SEQ ID NO: 732 - protein, 9 aa, synthetic construct
EFFMVANSP

SEQ ID NO: 733 - protein, 9 aa, synthetic construct
EFHMMGHFF

SEQ ID NO: 734 - protein, 9 aa, synthetic construct
EFHYWFRPS

SEQ ID NO: 735 - protein, 9 aa, synthetic construct
EFISLKSYE

SEQ ID NO: 736 - protein, 9 aa, synthetic construct
EFLCINHGE

SEQ ID NO: 737 - protein, 9 aa, synthetic construct
EFLVSGDSG

SEQ ID NO: 738 - protein, 9 aa, synthetic construct
EFNALSFNV

SEQ ID NO: 739 - protein, 9 aa, synthetic construct
EFNKLSFNH

SEQ ID NO: 740 - protein, 9 aa, synthetic construct
EFNNTMMGQ

SEQ ID NO: 741 - protein, 9 aa, synthetic construct
EFRHLTSMP

SEQ ID NO: 742 - protein, 9 aa, synthetic construct
EFRHNQMNT

SEQ ID NO: 743 - protein, 9 aa, synthetic construct
EFSPCVKMR

SEQ ID NO: 744 - protein, 9 aa, synthetic construct
EFSYNVVHF

SEQ ID NO: 745 - protein, 9 aa, synthetic construct
EFTKYSNAV

SEQ ID NO: 746 - protein, 9 aa, synthetic construct
EFTMNQHMW

SEQ ID NO: 747 - protein, 9 aa, synthetic construct
EFTTNYCHG

SEQ ID NO: 748 - protein, 9 aa, synthetic construct
EFWVTECDQ

SEQ ID NO: 749 - protein, 9 aa, synthetic construct
EGCQIPWTA

SEQ ID NO: 750 - protein, 9 aa, synthetic construct
EGDPFKLQK

SEQ ID NO: 751 - protein, 9 aa, synthetic construct
EGKQTNKAV

SEQ ID NO: 752 - protein, 9 aa, synthetic construct
EGLQGNNYY

SEQ ID NO: 753 - protein, 9 aa, synthetic construct
EGVQLNTDE

SEQ ID NO: 754 - protein, 9 aa, synthetic construct
EGYMCMSGH

SEQ ID NO: 755 - protein, 9 aa, synthetic construct
EGYSTHALG

SEQ ID NO: 756 - protein, 9 aa, synthetic construct
EHAWLWMQS

SEQ ID NO: 757 - protein, 9 aa, synthetic construct
EHCWYQFGA

SEQ ID NO: 758 - protein, 9 aa, synthetic construct
EHFKAGCLH

SEQ ID NO: 759 - protein, 9 aa, synthetic construct
EHGYMRCTK

SEQ ID NO: 760 - protein, 9 aa, synthetic construct
EHHVTTGCT

SEQ ID NO: 761 - protein, 9 aa, synthetic construct
EHKHMGCMN

SEQ ID NO: 762 - protein, 9 aa, synthetic construct
EHKPCHASD

SEQ ID NO: 763 - protein, 9 aa, synthetic construct
EHMQAKSAW

SEQ ID NO: 764 - protein, 9 aa, synthetic construct
EHNHMGCMN

SEQ ID NO: 765 - protein, 9 aa, synthetic construct
EHNWVQRAE

SEQ ID NO: 766 - protein, 9 aa, synthetic construct
EHQLVGDWF

SEQ ID NO: 767 - protein, 9 aa, synthetic construct
EHQLVGDWL

SEQ ID NO: 768 - protein, 9 aa, synthetic construct
EHSWFISYN

SEQ ID NO: 769 - protein, 9 aa, synthetic construct
EHSWINNMN

SEQ ID NO: 770 - protein, 9 aa, synthetic construct
EHTFGPVYR

SEQ ID NO: 771 - protein, 9 aa, synthetic construct
EHTQRGAAP

SEQ ID NO: 772 - protein, 9 aa, synthetic construct
EHTQRGCAG

SEQ ID NO: 773 - protein, 9 aa, synthetic construct
EHVQPMQWN

SEQ ID NO: 774 - protein, 9 aa, synthetic construct
EHWHQMSPS

SEQ ID NO: 775 - protein, 9 aa, synthetic construct
EHYSAHFFC

SEQ ID NO: 776 - protein, 9 aa, synthetic construct
EIASKMNQL

SEQ ID NO: 777 - protein, 9 aa, synthetic construct
EIDSKMHQL

SEQ ID NO: 778 - protein, 9 aa, synthetic construct
EIGPQPNQD

SEQ ID NO: 779 - protein, 9 aa, synthetic construct
EIGSVKHWE

SEQ ID NO: 780 - protein, 9 aa, synthetic construct
EIHKRIAMT

SEQ ID NO: 781 - protein, 9 aa, synthetic construct
EIKFSAGGI

SEQ ID NO: 782 - protein, 9 aa, synthetic construct
EILKIDYQV

SEQ ID NO: 783 - protein, 9 aa, synthetic construct
EINSLMYVD

SEQ ID NO: 784 - protein, 9 aa, synthetic construct
EISCMHMSM

SEQ ID NO: 785 - protein, 9 aa, synthetic construct
EISFEYCHE

SEQ ID NO: 786 - protein, 9 aa, synthetic construct
EISPQENQD

SEQ ID NO: 787 - protein, 9 aa, synthetic construct
EITEEALCD

SEQ ID NO: 788 - protein, 9 aa, synthetic construct
EITHYYSTD

SEQ ID NO: 789 - protein, 9 aa, synthetic construct
EIWSALAAN

SEQ ID NO: 790 - protein, 9 aa, synthetic construct
EIWVREVNS

SEQ ID NO: 791 - protein, 9 aa, synthetic construct
EKAHVQYAY

SEQ ID NO: 792 - protein, 9 aa, synthetic construct
EKDTPTCKM

SEQ ID NO: 793 - protein, 9 aa, synthetic construct
EKEMISTLE

SEQ ID NO: 794 - protein, 9 aa, synthetic construct
EKIMVNRAF

SEQ ID NO: 795 - protein, 9 aa, synthetic construct
EKLNAVQFC

SEQ ID NO: 796 - protein, 9 aa, synthetic construct
EKMNCLVRW

SEQ ID NO: 797 - protein, 9 aa, synthetic construct
EKNLYWTWE

SEQ ID NO: 798 - protein, 9 aa, synthetic construct
EKRINTSPG

SEQ ID NO: 799 - protein, 9 aa, synthetic construct
EKYRFSNGY

SEQ ID NO: 800 - protein, 9 aa, synthetic construct
ELCTNTMAS

SEQ ID NO: 801 - protein, 9 aa, synthetic construct
ELGTMTHSE

SEQ ID NO: 802 - protein, 9 aa, synthetic construct
ELMSMIIVE

SEQ ID NO: 803 - protein, 9 aa, synthetic construct
ELQEATHYP

SEQ ID NO: 804 - protein, 9 aa, synthetic construct
ELRDYHIGM

SEQ ID NO: 805 - protein, 9 aa, synthetic construct
ELRHAEQSQ

SEQ ID NO: 806 - protein, 9 aa, synthetic construct
ELRISEQSQ

SEQ ID NO: 807 - protein, 9 aa, synthetic construct
ELWDYHIGM

SEQ ID NO: 808 - protein, 9 aa, synthetic construct
ELYMSNWMM

SEQ ID NO: 809 - protein, 9 aa, synthetic construct
ELYSLAEQI

SEQ ID NO: 810 - protein, 9 aa, synthetic construct
EMAKYMWDP

SEQ ID NO: 811 - protein, 9 aa, synthetic construct
EMAMNLKDT

SEQ ID NO: 812 - protein, 9 aa, synthetic construct
EMAVANSTH

SEQ ID NO: 813 - protein, 9 aa, synthetic construct
EMCKGLCTT

SEQ ID NO: 814 - protein, 9 aa, synthetic construct
EMDWTHVSH

SEQ ID NO: 815 - protein, 9 aa, synthetic construct
EMESLNLLQ

SEQ ID NO: 816 - protein, 9 aa, synthetic construct
EMESRNLLQ

SEQ ID NO: 817 - protein, 9 aa, synthetic construct
EMFFYFGSQ

SEQ ID NO: 818 - protein, 9 aa, synthetic construct
EMHKVPSGM

SEQ ID NO: 819 - protein, 9 aa, synthetic construct
EMIHIGHRE

SEQ ID NO: 820 - protein, 9 aa, synthetic construct
EMKTQCHGE

SEQ ID NO: 821 - protein, 9 aa, synthetic construct
EMKTQTHFE

SEQ ID NO: 822 - protein, 9 aa, synthetic construct
EMKTTQDAE

SEQ ID NO: 823 - protein, 9 aa, synthetic construct
EMLPTQLNC

SEQ ID NO: 824 - protein, 9 aa, synthetic construct
EMLVAHFGN

SEQ ID NO: 825 - protein, 9 aa, synthetic construct
EMMCRCWLM

SEQ ID NO: 826 - protein, 9 aa, synthetic construct
EMMQQAFAQ

SEQ ID NO: 827 - protein, 9 aa, synthetic construct
EMNRYWTWE

SEQ ID NO: 828 - protein, 9 aa, synthetic construct
EMSEEFSHA

SEQ ID NO: 829 - protein, 9 aa, synthetic construct
EMYAFWQRG

SEQ ID NO: 830 - protein, 9 aa, synthetic construct
EMYMMQTDQ

SEQ ID NO: 831 - protein, 9 aa, synthetic construct
EMYPLFDAI

SEQ ID NO: 832 - protein, 9 aa, synthetic construct
EMYVTKADD

SEQ ID NO: 833 - protein, 9 aa, synthetic construct
ENAQMECLM

SEQ ID NO: 834 - protein, 9 aa, synthetic construct
ENCAVTFCA

SEQ ID NO: 835 - protein, 9 aa, synthetic construct
ENDQANLYA

SEQ ID NO: 836 - protein, 9 aa, synthetic construct
ENDRCHTCA

SEQ ID NO: 837 - protein, 9 aa, synthetic construct
ENDYVHGCM

SEQ ID NO: 838 - protein, 9 aa, synthetic construct
ENFIQNCPG

SEQ ID NO: 839 - protein, 9 aa, synthetic construct
ENGPLLCAR

SEQ ID NO: 840 - protein, 9 aa, synthetic construct
ENKPVDQDK

SEQ ID NO: 841 - protein, 9 aa, synthetic construct
ENLLEWKKA

SEQ ID NO: 842 - protein, 9 aa, synthetic construct
ENNTWMQWG

SEQ ID NO: 843 - protein, 9 aa, synthetic construct
ENQPANGWY

SEQ ID NO: 844 - protein, 9 aa, synthetic construct
ENQQGNQCV

SEQ ID NO: 845 - protein, 9 aa, synthetic construct
ENRLVQEVQ

SEQ ID NO: 846 - protein, 9 aa, synthetic construct
ENRMFQDSE

SEQ ID NO: 847 - protein, 9 aa, synthetic construct
ENSFYAGAG

SEQ ID NO: 848 - protein, 9 aa, synthetic construct
ENTTTVAPC

SEQ ID NO: 849 - protein, 9 aa, synthetic construct
ENVHINQAM

SEQ ID NO: 850 - protein, 9 aa, synthetic construct
EPVSLQYMD

SEQ ID NO: 851 - protein, 9 aa, synthetic construct
EPWKTHQQN

SEQ ID NO: 852 - protein, 9 aa, synthetic construct
EQAEYDSCD

SEQ ID NO: 853 - protein, 9 aa, synthetic construct
EQAGVASMW

SEQ ID NO: 854 - protein, 9 aa, synthetic construct
EQCAVWDCM

SEQ ID NO: 855 - protein, 9 aa, synthetic construct
EQFVSMNTG

SEQ ID NO: 856 - protein, 9 aa, synthetic construct
EQGFVMFNG

SEQ ID NO: 857 - protein, 9 aa, synthetic construct
EQGPLGSWF

SEQ ID NO: 858 - protein, 9 aa, synthetic construct
EQGQLWSWF

SEQ ID NO: 859 - protein, 9 aa, synthetic construct
EQNEETPFG

SEQ ID NO: 860 - protein, 9 aa, synthetic construct
EQRNMGERA

SEQ ID NO: 861 - protein, 9 aa, synthetic construct
EQRYCNSYV

SEQ ID NO: 862 - protein, 9 aa, synthetic construct
EQTGVNVCL

SEQ ID NO: 863 - protein, 9 aa, synthetic construct
ERELASATH

SEQ ID NO: 864 - protein, 9 aa, synthetic construct
ERHPINQAL

SEQ ID NO: 865 - protein, 9 aa, synthetic construct
ERQAHNNYA

SEQ ID NO: 866 - protein, 9 aa, synthetic construct
ERTVNLRDC

SEQ ID NO: 867 - protein, 9 aa, synthetic construct
ESCKTIRLE

SEQ ID NO: 868 - protein, 9 aa, synthetic construct
ESCLSQNRA

SEQ ID NO: 869 - protein, 9 aa, synthetic construct
ESEPFECCA

SEQ ID NO: 870 - protein, 9 aa, synthetic construct
ESESGHMEG

SEQ ID NO: 871 - protein, 9 aa, synthetic construct
ESGMIAVPH

SEQ ID NO: 872 - protein, 9 aa, synthetic construct
ESHLWLAME

SEQ ID NO: 873 - protein, 9 aa, synthetic construct
ESHSTQTYV

SEQ ID NO: 874 - protein, 9 aa, synthetic construct
ESHYRCMCN

SEQ ID NO: 875 - protein, 9 aa, synthetic construct
ESISSGVEG

SEQ ID NO: 876 - protein, 9 aa, synthetic construct
ESLSFQTLV

SEQ ID NO: 877 - protein, 9 aa, synthetic construct
ESMPFLDEA

SEQ ID NO: 878 - protein, 9 aa, synthetic construct
ESNPVSMDV

SEQ ID NO: 879 - protein, 9 aa, synthetic construct
ESTHMLYEM

SEQ ID NO: 880 - protein, 9 aa, synthetic construct
ESTPQFTSG

SEQ ID NO: 881 - protein, 9 aa, synthetic construct
ESTQRFDKM

SEQ ID NO: 882 - protein, 9 aa, synthetic construct
ESTSGWSMA

SEQ ID NO: 883 - protein, 9 aa, synthetic construct
ESTSNWAMA

SEQ ID NO: 884 - protein, 9 aa, synthetic construct
ESVLKNQFE

SEQ ID NO: 885 - protein, 9 aa, synthetic construct
ESWMKLEWQ

SEQ ID NO: 886 - protein, 9 aa, synthetic construct
ETAIRDLTQ

SEQ ID NO: 887 - protein, 9 aa, synthetic construct
ETCLSMHYL

SEQ ID NO: 888 - protein, 9 aa, synthetic construct
ETDVSWCES

SEQ ID NO: 889 - protein, 9 aa, synthetic construct
ETEFRQLDG

SEQ ID NO: 890 - protein, 9 aa, synthetic construct
ETEVKSHWD

SEQ ID NO: 891 - protein, 9 aa, synthetic construct
ETFIFPGAG

SEQ ID NO: 892 - protein, 9 aa, synthetic construct
ETFVRHADY

SEQ ID NO: 893 - protein, 9 aa, synthetic construct
ETGKTIYHQ

SEQ ID NO: 894 - protein, 9 aa, synthetic construct
ETGPRQDLF

SEQ ID NO: 895 - protein, 9 aa, synthetic construct
ETHFVQGRM

SEQ ID NO: 896 - protein, 9 aa, synthetic construct
ETHILDQFC

SEQ ID NO: 897 - protein, 9 aa, synthetic construct
ETHIVFGQW

SEQ ID NO: 898 - protein, 9 aa, synthetic construct
ETHNKHTDY

SEQ ID NO: 899 - protein, 9 aa, synthetic construct
ETISSGIEG

SEQ ID NO: 900 - protein, 9 aa, synthetic construct
ETLAKLHCA

SEQ ID NO: 901 - protein, 9 aa, synthetic construct
ETLSRSDIC

SEQ ID NO: 902 - protein, 9 aa, synthetic construct
ETNEVMVQQ

SEQ ID NO: 903 - protein, 9 aa, synthetic construct
ETRVSWCEW

SEQ ID NO: 904 - protein, 9 aa, synthetic construct
ETSLSGNQY

SEQ ID NO: 905 - protein, 9 aa, synthetic construct
ETSTSCAWL

SEQ ID NO: 906 - protein, 9 aa, synthetic construct
ETTHYYSTF

SEQ ID NO: 907 - protein, 9 aa, synthetic construct
ETTLHDLWL

SEQ ID NO: 908 - protein, 9 aa, synthetic construct
ETTLQDLWE

SEQ ID NO: 909 - protein, 9 aa, synthetic construct
ETVICDGVT

SEQ ID NO: 910 - protein, 9 aa, synthetic construct
EVCSIHWMG

SEQ ID NO: 911 - protein, 9 aa, synthetic construct
EVEVLEMGH

SEQ ID NO: 912 - protein, 9 aa, synthetic construct
EVEVMVYSW

SEQ ID NO: 913 - protein, 9 aa, synthetic construct
EVEWYYGQS

SEQ ID NO: 914 - protein, 9 aa, synthetic construct
EVFEEYWSL

SEQ ID NO: 915 - protein, 9 aa, synthetic construct
EVHGRNQDN

SEQ ID NO: 916 - protein, 9 aa, synthetic construct
EVHGWNQDN

SEQ ID NO: 917 - protein, 9 aa, synthetic construct
EVHKGAVMD

SEQ ID NO: 918 - protein, 9 aa, synthetic construct
EVHKYCCNS

SEQ ID NO: 919 - protein, 9 aa, synthetic construct
EVHSTQTAV

SEQ ID NO: 920 - protein, 9 aa, synthetic construct
EVIRSPIEG

SEQ ID NO: 921 - protein, 9 aa, synthetic construct
EVKPIGHSQ

SEQ ID NO: 922 - protein, 9 aa, synthetic construct
EVLLSTDEA

SEQ ID NO: 923 - protein, 9 aa, synthetic construct
EVLVAEWQG

SEQ ID NO: 924 - protein, 9 aa, synthetic construct
EVLVAFATN

SEQ ID NO: 925 - protein, 9 aa, synthetic construct
EVLVAVWQG

SEQ ID NO: 926 - protein, 9 aa, synthetic construct
EVMPYHRTH

SEQ ID NO: 927 - protein, 9 aa, synthetic construct
EVNQQMKAK

SEQ ID NO: 928 - protein, 9 aa, synthetic construct
EVRQWQDED

SEQ ID NO: 929 - protein, 9 aa, synthetic construct
EVSFYAGAI

SEQ ID NO: 930 - protein, 9 aa, synthetic construct
EVSRQMYSQ

SEQ ID NO: 931 - protein, 9 aa, synthetic construct
EVTDPCECA

SEQ ID NO: 932 - protein, 9 aa, synthetic construct
EVTTIAQDH

SEQ ID NO: 933 - protein, 9 aa, synthetic construct
EVVRRCYEC

SEQ ID NO: 934 - protein, 9 aa, synthetic construct
EWCLLHVGH

SEQ ID NO: 935 - protein, 9 aa, synthetic construct
EWEQTWRAP

SEQ ID NO: 936 - protein, 9 aa, synthetic construct
EWFQAGICD

SEQ ID NO: 937 - protein, 9 aa, synthetic construct
EWKHDRNDI

SEQ ID NO: 938 - protein, 9 aa, synthetic construct
EWKHYRNDI

SEQ ID NO: 939 - protein, 9 aa, synthetic construct
EWQGLQQFT

SEQ ID NO: 940 - protein, 9 aa, synthetic construct
EWSGLQSCF

SEQ ID NO: 941 - protein, 9 aa, synthetic construct
EWVFQHLSS

SEQ ID NO: 942 - protein, 9 aa, synthetic construct
EWYCFLDSG

SEQ ID NO: 943 - protein, 9 aa, synthetic construct
EYACHNRMP

SEQ ID NO: 944 - protein, 9 aa, synthetic construct
EYCEFRQMD

SEQ ID NO: 945 - protein, 9 aa, synthetic construct
EYCKYSLGL

SEQ ID NO: 946 - protein, 9 aa, synthetic construct
EYEHMMWSQ

SEQ ID NO: 947 - protein, 9 aa, synthetic construct
EYKSYGNCQ

SEQ ID NO: 948 - protein, 9 aa, synthetic construct
EYLWEAIEH

SEQ ID NO: 949 - protein, 9 aa, synthetic construct
EYMQQAFAW

SEQ ID NO: 950 - protein, 9 aa, synthetic construct
EYNIYIATD

SEQ ID NO: 951 - protein, 9 aa, synthetic construct
EYQISKTMC

SEQ ID NO: 952 - protein, 9 aa, synthetic construct
EYQISNTMC

SEQ ID NO: 953 - protein, 9 aa, synthetic construct
EYSTLPMTT

SEQ ID NO: 954 - protein, 9 aa, synthetic construct
EYTKYQLGL

SEQ ID NO: 955 - protein, 9 aa, synthetic construct
EYVSLINEI

SEQ ID NO: 956 - protein, 9 aa, synthetic construct
EYWLNSSQA

SEQ ID NO: 957 - protein, 9 aa, synthetic construct
FACWILYIG

SEQ ID NO: 958 - protein, 9 aa, synthetic construct
FAEIHMQYH

SEQ ID NO: 959 - protein, 9 aa, synthetic construct
FAEPLENWM

SEQ ID NO: 960 - protein, 9 aa, synthetic construct
FAGFALHDS

SEQ ID NO: 961 - protein, 9 aa, synthetic construct
FAGMYRRNS

SEQ ID NO: 962 - protein, 9 aa, synthetic construct
FAILSGQTL

SEQ ID NO: 963 - protein, 9 aa, synthetic construct
FAIWNYESK

SEQ ID NO: 964 - protein, 9 aa, synthetic construct
FALSRNGNG

SEQ ID NO: 965 - protein, 9 aa, synthetic construct
FALTCEEAP

SEQ ID NO: 966 - protein, 9 aa, synthetic construct
FALTCNEAG

SEQ ID NO: 967 - protein, 9 aa, synthetic construct
FAMKVLDIQ

SEQ ID NO: 968 - protein, 9 aa, synthetic construct
FAMLGYWVH

SEQ ID NO: 969 - protein, 9 aa, synthetic construct
FANCSTHQD

SEQ ID NO: 970 - protein, 9 aa, synthetic construct
FAQLNQASM

SEQ ID NO: 971 - protein, 9 aa, synthetic construct
FASRQGDNH

SEQ ID NO: 972 - protein, 9 aa, synthetic construct
FASTTAECM

SEQ ID NO: 973 - protein, 9 aa, synthetic construct
FATAHQKCW

SEQ ID NO: 974 - protein, 9 aa, synthetic construct
FATQNQSPS

SEQ ID NO: 975 - protein, 9 aa, synthetic construct
FAVMTSTEN

SEQ ID NO: 976 - protein, 9 aa, synthetic construct
FCAGCDMAN

SEQ ID NO: 977 - protein, 9 aa, synthetic construct
FCCHLAAHK

SEQ ID NO: 978 - protein, 9 aa, synthetic construct
FCCSKANDC

SEQ ID NO: 979 - protein, 9 aa, synthetic construct
FCDVVKHHL

SEQ ID NO: 980 - protein, 9 aa, synthetic construct
FCDYHNTIE

SEQ ID NO: 981 - protein, 9 aa, synthetic construct
FCITGNACA

SEQ ID NO: 982 - protein, 9 aa, synthetic construct
FCNSYTMLP

SEQ ID NO: 983 - protein, 9 aa, synthetic construct
FCPNSQMDG

SEQ ID NO: 984 - protein, 9 aa, synthetic construct
FCQNPTQAM

SEQ ID NO: 985 - protein, 9 aa, synthetic construct
FCVNQQTCQ

SEQ ID NO: 986 - protein, 9 aa, synthetic construct
FDALMCWKI

SEQ ID NO: 987 - protein, 9 aa, synthetic construct
FDANDCRPS

SEQ ID NO: 988 - protein, 9 aa, synthetic construct
FDKCHMADW

SEQ ID NO: 989 - protein, 9 aa, synthetic construct
FEACVTECL

SEQ ID NO: 990 - protein, 9 aa, synthetic construct
FEKTMVAMH

SEQ ID NO: 991 - protein, 9 aa, synthetic construct
FFGNVMKEQ

SEQ ID NO: 992 - protein, 9 aa, synthetic construct
FFGWFHMNN

SEQ ID NO: 993 - protein, 9 aa, synthetic construct
FFHVAWLSI

SEQ ID NO: 994 - protein, 9 aa, synthetic construct
FFLKLNDVP

SEQ ID NO: 995 - protein, 9 aa, synthetic construct
FFNHDNIGN

SEQ ID NO: 996 - protein, 9 aa, synthetic construct
FFNNISTYF

SEQ ID NO: 997 - protein, 9 aa, synthetic construct
FFNPTTQQN

SEQ ID NO: 998 - protein, 9 aa, synthetic construct
FFPWEWECW

SEQ ID NO: 999 - protein, 9 aa, synthetic construct
FFSHIQAAD

SEQ ID NO: 1000 - protein, 9 aa, synthetic construct
FFSMVENCG

SEQ ID NO: 1001 - protein, 9 aa, synthetic construct
FFTNRNHEE

SEQ ID NO: 1002 - protein, 9 aa, synthetic construct
FFVKMMCSH

SEQ ID NO: 1003 - protein, 9 aa, synthetic construct
FFVTWICRL

SEQ ID NO: 1004 - protein, 9 aa, synthetic construct
FFYFLDILK

SEQ ID NO: 1005 - protein, 9 aa, synthetic construct
FFYSTNFGM

SEQ ID NO: 1006 - protein, 9 aa, synthetic construct
FGAEMHCPM

SEQ ID NO: 1007 - protein, 9 aa, synthetic construct
FGDFFFNHN

SEQ ID NO: 1008 - protein, 9 aa, synthetic construct
FGKWLTRLH

SEQ ID NO: 1009 - protein, 9 aa, synthetic construct
FGNSMMLQS

SEQ ID NO: 1010 - protein, 9 aa, synthetic construct
FHAMKHVLE

SEQ ID NO: 1011 - protein, 9 aa, synthetic construct
FHLHTHRED

SEQ ID NO: 1012 - protein, 9 aa, synthetic construct
FHNSKSEKH

SEQ ID NO: 1013 - protein, 9 aa, synthetic construct
FHSFIHQHE

SEQ ID NO: 1014 - protein, 9 aa, synthetic construct
FHTNYICQE

SEQ ID NO: 1015 - protein, 9 aa, synthetic construct
FHVKVSCDS

SEQ ID NO: 1016 - protein, 9 aa, synthetic construct
FICHVKEGA

SEQ ID NO: 1017 - protein, 9 aa, synthetic construct
FICRHIHGI

SEQ ID NO: 1018 - protein, 9 aa, synthetic construct
FICSSQCGA

SEQ ID NO: 1019 - protein, 9 aa, synthetic construct
FIEFTIGEF

SEQ ID NO: 1020 - protein, 9 aa, synthetic construct
FIGLKNAHL

SEQ ID NO: 1021 - protein, 9 aa, synthetic construct
FIPNKWLGN

SEQ ID NO: 1022 - protein, 9 aa, synthetic construct
FIQMTMSSD

SEQ ID NO: 1023 - protein, 9 aa, synthetic construct
FITQYPNAE

SEQ ID NO: 1024 - protein, 9 aa, synthetic construct
FKFMVDTSS

SEQ ID NO: 1025 - protein, 9 aa, synthetic construct
FKIECGLFQ

SEQ ID NO: 1026 - protein, 9 aa, synthetic construct
FKNDSVDHE

SEQ ID NO: 1027 - protein, 9 aa, synthetic construct
FLEYAVQNQ

SEQ ID NO: 1028 - protein, 9 aa, synthetic construct
FLQWTESGD

SEQ ID NO: 1029 - protein, 9 aa, synthetic construct
FLVGQHVHP

SEQ ID NO: 1030 - protein, 9 aa, synthetic construct
FLVVNHFGH

SEQ ID NO: 1031 - protein, 9 aa, synthetic construct
FMECLKDTK

SEQ ID NO: 1032 - protein, 9 aa, synthetic construct
FMEDKQVFS

SEQ ID NO: 1033 - protein, 9 aa, synthetic construct
FMEYYLWYC

SEQ ID NO: 1034 - protein, 9 aa, synthetic construct
FMSLVNAGE

SEQ ID NO: 1035 - protein, 9 aa, synthetic construct
FMTMLGCSM

SEQ ID NO: 1036 - protein, 9 aa, synthetic construct
FNARRDTWF

SEQ ID NO: 1037 - protein, 9 aa, synthetic construct
FNGYYETQG

SEQ ID NO: 1038 - protein, 9 aa, synthetic construct
FNQFEFVSA

SEQ ID NO: 1039 - protein, 9 aa, synthetic construct
FNRCMEDRG

SEQ ID NO: 1040 - protein, 9 aa, synthetic construct
FNSNLGAAT

SEQ ID NO: 1041 - protein, 9 aa, synthetic construct
FNSSYGTNQ

SEQ ID NO: 1042 - protein, 9 aa, synthetic construct
FNTQLLMSG

SEQ ID NO: 1043 - protein, 9 aa, synthetic construct
FPEKAIVGQ

SEQ ID NO: 1044 - protein, 9 aa, synthetic construct
FPEPFPMWG

SEQ ID NO: 1045 - protein, 9 aa, synthetic construct
FPMPFPMWK

SEQ ID NO: 1046 - protein, 9 aa, synthetic construct
FQAMIMTNY

SEQ ID NO: 1047 - protein, 9 aa, synthetic construct
FQAVCIWIS

SEQ ID NO: 1048 - protein, 9 aa, synthetic construct
FQCSVHKFV

SEQ ID NO: 1049 - protein, 9 aa, synthetic construct
FQECEAPQH

SEQ ID NO: 1050 - protein, 9 aa, synthetic construct
FQEVFSFFN

SEQ ID NO: 1051 - protein, 9 aa, synthetic construct
FQFWRQIME

SEQ ID NO: 1052 - protein, 9 aa, synthetic construct
FQIPLKAVA

SEQ ID NO: 1053 - protein, 9 aa, synthetic construct
FQSMQHDNN

SEQ ID NO: 1054 - protein, 9 aa, synthetic construct
FSADSMCSF

SEQ ID NO: 1055 - protein, 9 aa, synthetic construct
FSAPITAHF

SEQ ID NO: 1056 - protein, 9 aa, synthetic construct
FSAPLFHCA

SEQ ID NO: 1057 - protein, 9 aa, synthetic construct
FSEPLFHLF

SEQ ID NO: 1058 - protein, 9 aa, synthetic construct
FSEVKGMSG

SEQ ID NO: 1059 - protein, 9 aa, synthetic construct
FSFRTARQQ

SEQ ID NO: 1060 - protein, 9 aa, synthetic construct
FSFRTARYL

SEQ ID NO: 1061 - protein, 9 aa, synthetic construct
FSGTVYCWC

SEQ ID NO: 1062 - protein, 9 aa, synthetic construct
FSLPNNCDD

SEQ ID NO: 1063 - protein, 9 aa, synthetic construct
FSNTVYKWC

SEQ ID NO: 1064 - protein, 9 aa, synthetic construct
FSTHLTDAC

SEQ ID NO: 1065 - protein, 9 aa, synthetic construct
FSTSYCHED

SEQ ID NO: 1066 - protein, 9 aa, synthetic construct
FTDNPNWYA

SEQ ID NO: 1067 - protein, 9 aa, synthetic construct
FTERTKCAA

SEQ ID NO: 1068 - protein, 9 aa, synthetic construct
FTEYEHCAS

SEQ ID NO: 1069 - protein, 9 aa, synthetic construct
FTHQRNALT

SEQ ID NO: 1070 - protein, 9 aa, synthetic construct
FTHTFEACG

SEQ ID NO: 1071 - protein, 9 aa, synthetic construct
FTIIKNNCL

SEQ ID NO: 1072 - protein, 9 aa, synthetic construct
FTMDINLND

SEQ ID NO: 1073 - protein, 9 aa, synthetic construct
FTMQSGDYH

SEQ ID NO: 1074 - protein, 9 aa, synthetic construct
FTNFKMNMY

SEQ ID NO: 1075 - protein, 9 aa, synthetic construct
FTNQLPEAN

SEQ ID NO: 1076 - protein, 9 aa, synthetic construct
FTNYKYSFE

SEQ ID NO: 1077 - protein, 9 aa, synthetic construct
FTQQEFHGQ

SEQ ID NO: 1078 - protein, 9 aa, synthetic construct
FTTDYQMIA

SEQ ID NO: 1079 - protein, 9 aa, synthetic construct
FTVDQLNWQ

SEQ ID NO: 1080 - protein, 9 aa, synthetic construct
FTWHIESKF

SEQ ID NO: 1081 - protein, 9 aa, synthetic construct
FTYGFQTIN

SEQ ID NO: 1082 - protein, 9 aa, synthetic construct
FTYNFMNSW

SEQ ID NO: 1083 - protein, 9 aa, synthetic construct
FVDEAFAWQ

SEQ ID NO: 1084 - protein, 9 aa, synthetic construct
FVGFALHDS

SEQ ID NO: 1085 - protein, 9 aa, synthetic construct
FVHASMINA

SEQ ID NO: 1086 - protein, 9 aa, synthetic construct
FVIGHHLFP

SEQ ID NO: 1087 - protein, 9 aa, synthetic construct
FVRGPWQCE

SEQ ID NO: 1088 - protein, 9 aa, synthetic construct
FVRWSPYPI

SEQ ID NO: 1089 - protein, 9 aa, synthetic construct
FVSAMSGPC

SEQ ID NO: 1090 - protein, 9 aa, synthetic construct
FVSKSEEYH

SEQ ID NO: 1091 - protein, 9 aa, synthetic construct
FVSLMSGPN

SEQ ID NO: 1092 - protein, 9 aa, synthetic construct
FVTVMQFQD

SEQ ID NO: 1093 - protein, 9 aa, synthetic construct
FVTVTACDG

SEQ ID NO: 1094 - protein, 9 aa, synthetic construct
FVWMTGLNM

SEQ ID NO: 1095 - protein, 9 aa, synthetic construct
FWELNGPKN

SEQ ID NO: 1096 - protein, 9 aa, synthetic construct
FWGQYHVQG

SEQ ID NO: 1097 - protein, 9 aa, synthetic construct
FWHEYNFTN

SEQ ID NO: 1098 - protein, 9 aa, synthetic construct
FWKMLGHNH

SEQ ID NO: 1099 - protein, 9 aa, synthetic construct
FWMQTEHGK

SEQ ID NO: 1100 - protein, 9 aa, synthetic construct
FWMQTEHGT

SEQ ID NO: 1101 - protein, 9 aa, synthetic construct
FWNFFHSHL

SEQ ID NO: 1102 - protein, 9 aa, synthetic construct
FWNMVDTGG

SEQ ID NO: 1103 - protein, 9 aa, synthetic construct
FWNQQSQCF

SEQ ID NO: 1104 - protein, 9 aa, synthetic construct
FWQQYNEAN

SEQ ID NO: 1105 - protein, 9 aa, synthetic construct
FWRSLDMQY

SEQ ID NO: 1106 - protein, 9 aa, synthetic construct
FWSNIGAAP

SEQ ID NO: 1107 - protein, 9 aa, synthetic construct
FWSQYDLMY

SEQ ID NO: 1108 - protein, 9 aa, synthetic construct
FWTSYDSSH

SEQ ID NO: 1109 - protein, 9 aa, synthetic construct
FYCSKMRGL

SEQ ID NO: 1110 - protein, 9 aa, synthetic construct
FYYNYMHHS

SEQ ID NO: 1111 - protein, 9 aa, synthetic construct
GAAQFGAFY

SEQ ID NO: 1112 - protein, 9 aa, synthetic construct
GAFIIQKTP

SEQ ID NO: 1113 - protein, 9 aa, synthetic construct
GAFMGLMTQ

SEQ ID NO: 1114 - protein, 9 aa, synthetic construct
GAFVGLMTQ

SEQ ID NO: 1115 - protein, 9 aa, synthetic construct
GAHMHDTHL

SEQ ID NO: 1116 - protein, 9 aa, synthetic construct
GAKTYGEME

SEQ ID NO: 1117 - protein, 9 aa, synthetic construct
GASFYEGME

SEQ ID NO: 1118 - protein, 9 aa, synthetic construct
GATECFNPC

SEQ ID NO: 1119 - protein, 9 aa, synthetic construct
GATQCFNPF

SEQ ID NO: 1120 - protein, 9 aa, synthetic construct
GCDKWLGLC

SEQ ID NO: 1121 - protein, 9 aa, synthetic construct
GCELISVGQ

SEQ ID NO: 1122 - protein, 9 aa, synthetic construct
GCTPRQEMP

SEQ ID NO: 1123 - protein, 9 aa, synthetic construct
GDMGCNVKL

SEQ ID NO: 1124 - protein, 9 aa, synthetic construct
GEEVGCIWG

SEQ ID NO: 1125 - protein, 9 aa, synthetic construct
GEKTYGEMY

SEQ ID NO: 1126 - protein, 9 aa, synthetic construct
GEQQMPFIC

SEQ ID NO: 1127 - protein, 9 aa, synthetic construct
GEYNERMHI

SEQ ID NO: 1128 - protein, 9 aa, synthetic construct
GFANFMMNF

SEQ ID NO: 1129 - protein, 9 aa, synthetic construct
GFANFNMTD

SEQ ID NO: 1130 - protein, 9 aa, synthetic construct
GFDNVSFSY

SEQ ID NO: 1131 - protein, 9 aa, synthetic construct
GFEEMDAQM

SEQ ID NO: 1132 - protein, 9 aa, synthetic construct
GFEEQLTSK

SEQ ID NO: 1133 - protein, 9 aa, synthetic construct
GFEMSTSHS

SEQ ID NO: 1134 - protein, 9 aa, synthetic construct
GFFLTKQDG

SEQ ID NO: 1135 - protein, 9 aa, synthetic construct
GFFTQMSQS

SEQ ID NO: 1136 - protein, 9 aa, synthetic construct
GFGTYLSMH

SEQ ID NO: 1137 - protein, 9 aa, synthetic construct
GFIDYQMQD

SEQ ID NO: 1138 - protein, 9 aa, synthetic construct
GFMHYCSHV

SEQ ID NO: 1139 - protein, 9 aa, synthetic construct
GFMLPIYWC

SEQ ID NO: 1140 - protein, 9 aa, synthetic construct
GFTFMEASH

SEQ ID NO: 1141 - protein, 9 aa, synthetic construct
GGAGVHHHT

SEQ ID NO: 1142 - protein, 9 aa, synthetic construct
GGQTIKEHF

SEQ ID NO: 1143 - protein, 9 aa, synthetic construct
GGWSDSNDA

SEQ ID NO: 1144 - protein, 9 aa, synthetic construct
GGYNERMHI

SEQ ID NO: 1145 - protein, 9 aa, synthetic construct
GHCYTQQQH

SEQ ID NO: 1146 - protein, 9 aa, synthetic construct
GHDFTQFQE

SEQ ID NO: 1147 - protein, 9 aa, synthetic construct
GHEDLLAMD

SEQ ID NO: 1148 - protein, 9 aa, synthetic construct
GHESCGLWT

SEQ ID NO: 1149 - protein, 9 aa, synthetic construct
GHLECCWSI

SEQ ID NO: 1150 - protein, 9 aa, synthetic construct
GHSFRYACD

SEQ ID NO: 1151 - protein, 9 aa, synthetic construct
GHVQAECMY

SEQ ID NO: 1152 - protein, 9 aa, synthetic construct
GIADYQQQG

SEQ ID NO: 1153 - protein, 9 aa, synthetic construct
GIFFCQEEK

SEQ ID NO: 1154 - protein, 9 aa, synthetic construct
GIGWLKHFE

SEQ ID NO: 1155 - protein, 9 aa, synthetic construct
GIICVTRDD

SEQ ID NO: 1156 - protein, 9 aa, synthetic construct
GIKCERDAD

SEQ ID NO: 1157 - protein, 9 aa, synthetic construct
GIKLTGTDH

SEQ ID NO: 1158 - protein, 9 aa, synthetic construct
GILELHFGV

SEQ ID NO: 1159 - protein, 9 aa, synthetic construct
GILHLHQCI

SEQ ID NO: 1160 - protein, 9 aa, synthetic construct
GILNITMDQ

SEQ ID NO: 1161 - protein, 9 aa, synthetic construct
GIMCREQCD

SEQ ID NO: 1162 - protein, 9 aa, synthetic construct
GIMKHQETS

SEQ ID NO: 1163 - protein, 9 aa, synthetic construct
GIMMQQMDP

SEQ ID NO: 1164 - protein, 9 aa, synthetic construct
GIQQHAIMA

SEQ ID NO: 1165 - protein, 9 aa, synthetic construct
GIREQEYCP

SEQ ID NO: 1166 - protein, 9 aa, synthetic construct
GIRWADHWN

SEQ ID NO: 1167 - protein, 9 aa, synthetic construct
GIVMMQAMD

SEQ ID NO: 1168 - protein, 9 aa, synthetic construct
GIVNCTRLG

SEQ ID NO: 1169 - protein, 9 aa, synthetic construct
GIVPLGTNY

SEQ ID NO: 1170 - protein, 9 aa, synthetic construct
GIYMNQENA

SEQ ID NO: 1171 - protein, 9 aa, synthetic construct
GIYPWMTYA

SEQ ID NO: 1172 - protein, 9 aa, synthetic construct
GKQFDEQLE

SEQ ID NO: 1173 - protein, 9 aa, synthetic construct
GKQFDEQQM

SEQ ID NO: 1174 - protein, 9 aa, synthetic construct
GKSPMGEMP

SEQ ID NO: 1175 - protein, 9 aa, synthetic construct
GLFWMWVDN

SEQ ID NO: 1176 - protein, 9 aa, synthetic construct
GLIFHQSLS

SEQ ID NO: 1177 - protein, 9 aa, synthetic construct
GLMSASAHS

SEQ ID NO: 1178 - protein, 9 aa, synthetic construct
GLMTQQNAD

SEQ ID NO: 1179 - protein, 9 aa, synthetic construct
GLMTQQNSD

SEQ ID NO: 1180 - protein, 9 aa, synthetic construct
GLNICKNQQ

SEQ ID NO: 1181 - protein, 9 aa, synthetic construct
GLNKFMQGP

SEQ ID NO: 1182 - protein, 9 aa, synthetic construct
GLSCKSAWL

SEQ ID NO: 1183 - protein, 9 aa, synthetic construct
GLYWQCDGM

SEQ ID NO: 1184 - protein, 9 aa, synthetic construct
GMEHLWNVD

SEQ ID NO: 1185 - protein, 9 aa, synthetic construct
GMKFTAQGN

SEQ ID NO: 1186 - protein, 9 aa, synthetic construct
GMKILRTRK

SEQ ID NO: 1187 - protein, 9 aa, synthetic construct
GMNFCLASH

SEQ ID NO: 1188 - protein, 9 aa, synthetic construct
GMRDVFDCY

SEQ ID NO: 1189 - protein, 9 aa, synthetic construct
GMRYHDDLF

SEQ ID NO: 1190 - protein, 9 aa, synthetic construct
GMSFYNFFE

SEQ ID NO: 1191 - protein, 9 aa, synthetic construct
GMSSYTCED

SEQ ID NO: 1192 - protein, 9 aa, synthetic construct
GMTPRMMGM

SEQ ID NO: 1193 - protein, 9 aa, synthetic construct
GMTSWGCWE

SEQ ID NO: 1194 - protein, 9 aa, synthetic construct
GNEGADAEE

SEQ ID NO: 1195 - protein, 9 aa, synthetic construct
GNEKCGTAV

SEQ ID NO: 1196 - protein, 9 aa, synthetic construct
GNKSFQYAS

SEQ ID NO: 1197 - protein, 9 aa, synthetic construct
GNMEQEGCP

SEQ ID NO: 1198 - protein, 9 aa, synthetic construct
GNYLYMHQG

SEQ ID NO: 1199 - protein, 9 aa, synthetic construct
GPFSFLRGA

SEQ ID NO: 1200 - protein, 9 aa, synthetic construct
GPFSFLRGG

SEQ ID NO: 1201 - protein, 9 aa, synthetic construct
GPNGDAARY

SEQ ID NO: 1202 - protein, 9 aa, synthetic construct
GQAVSHAFS

SEQ ID NO: 1203 - protein, 9 aa, synthetic construct
GQFWTNDAA

SEQ ID NO: 1204 - protein, 9 aa, synthetic construct
GQGVAQQCA

SEQ ID NO: 1205 - protein, 9 aa, synthetic construct
GQHFVMLSS

SEQ ID NO: 1206 - protein, 9 aa, synthetic construct
GQHLQIGAE

SEQ ID NO: 1207 - protein, 9 aa, synthetic construct
GQNTTDRSN

SEQ ID NO: 1208 - protein, 9 aa, synthetic construct
GQPVCCVCM

SEQ ID NO: 1209 - protein, 9 aa, synthetic construct
GQQHYGWQQ

SEQ ID NO: 1210 - protein, 9 aa, synthetic construct
GQSFYTCED

SEQ ID NO: 1211 - protein, 9 aa, synthetic construct
GQVHTSYYG

SEQ ID NO: 1212 - protein, 9 aa, synthetic construct
GQVQHECMY

SEQ ID NO: 1213 - protein, 9 aa, synthetic construct
GRCFMPPGR

SEQ ID NO: 1214 - protein, 9 aa, synthetic construct
GRVLANCAE

SEQ ID NO: 1215 - protein, 9 aa, synthetic construct
GSDAIMWDC

SEQ ID NO: 1216 - protein, 9 aa, synthetic construct
GSDAQMWDH

SEQ ID NO: 1217 - protein, 9 aa, synthetic construct
GSEHKGIGE

SEQ ID NO: 1218 - protein, 9 aa, synthetic construct
GSEWRQDMG

SEQ ID NO: 1219 - protein, 9 aa, synthetic construct
GSFMSCEKN

SEQ ID NO: 1220 - protein, 9 aa, synthetic construct
GSFQQMASL

SEQ ID NO: 1221 - protein, 9 aa, synthetic construct
GSFWHNDAA

SEQ ID NO: 1222 - protein, 9 aa, synthetic construct
GSHNTGAWP

SEQ ID NO: 1223 - protein, 9 aa, synthetic construct
GSMHNSICY

SEQ ID NO: 1224 - protein, 9 aa, synthetic construct
GSNDRLDSC

SEQ ID NO: 1225 - protein, 9 aa, synthetic construct
GSTSMITHA

SEQ ID NO: 1226 - protein, 9 aa, synthetic construct
GTADKPTGI

SEQ ID NO: 1227 - protein, 9 aa, synthetic construct
GTASLDVLS

SEQ ID NO: 1228 - protein, 9 aa, synthetic construct
GTCSMTLDN

SEQ ID NO: 1229 - protein, 9 aa, synthetic construct
GTESLAVLS

SEQ ID NO: 1230 - protein, 9 aa, synthetic construct
GTGFWWGCY

SEQ ID NO: 1231 - protein, 9 aa, synthetic construct
GTIHMYCGW

SEQ ID NO: 1232 - protein, 9 aa, synthetic construct
GTLEHTSST

SEQ ID NO: 1233 - protein, 9 aa, synthetic construct
GTMPFWAYD

SEQ ID NO: 1234 - protein, 9 aa, synthetic construct
GTMTCHYHH

SEQ ID NO: 1235 - protein, 9 aa, synthetic construct
GTPQGKQRQ

SEQ ID NO: 1236 - protein, 9 aa, synthetic construct
GTPWKEQFK

SEQ ID NO: 1237 - protein, 9 aa, synthetic construct
GTQFAQGDN

SEQ ID NO: 1238 - protein, 9 aa, synthetic construct
GTQVRHHDY

SEQ ID NO: 1239 - protein, 9 aa, synthetic construct
GTQWQVSHW

SEQ ID NO: 1240 - protein, 9 aa, synthetic construct
GTQWTQWMK

SEQ ID NO: 1241 - protein, 9 aa, synthetic construct
GTSWELWNA

SEQ ID NO: 1242 - protein, 9 aa, synthetic construct
GTVLKMNDI

SEQ ID NO: 1243 - protein, 9 aa, synthetic construct
GTVQAIVCT

SEQ ID NO: 1244 - protein, 9 aa, synthetic construct
GTWINEQMG

SEQ ID NO: 1245 - protein, 9 aa, synthetic construct
GVADKPTGY

SEQ ID NO: 1246 - protein, 9 aa, synthetic construct
GVEGHGQFD

SEQ ID NO: 1247 - protein, 9 aa, synthetic construct
GVFYVGHWQ

SEQ ID NO: 1248 - protein, 9 aa, synthetic construct
GVINMLASD

SEQ ID NO: 1249 - protein, 9 aa, synthetic construct
GVMSCKVIG

SEQ ID NO: 1250 - protein, 9 aa, synthetic construct
GVMSMSFPV

SEQ ID NO: 1251 - protein, 9 aa, synthetic construct
GVQHYQLGM

SEQ ID NO: 1252 - protein, 9 aa, synthetic construct
GVQHYWLGT

SEQ ID NO: 1253 - protein, 9 aa, synthetic construct
GVQYGSQHF

SEQ ID NO: 1254 - protein, 9 aa, synthetic construct
GVTTSNYCP

SEQ ID NO: 1255 - protein, 9 aa, synthetic construct
GVTVCWSNQ

SEQ ID NO: 1256 - protein, 9 aa, synthetic construct
GVTYHHRQC

SEQ ID NO: 1257 - protein, 9 aa, synthetic construct
GVVATQRSG

SEQ ID NO: 1258 - protein, 9 aa, synthetic construct
GVYDTLSSF

SEQ ID NO: 1259 - protein, 9 aa, synthetic construct
GVYQQFHWF

SEQ ID NO: 1260 - protein, 9 aa, synthetic construct
GWDWIMCNK

SEQ ID NO: 1261 - protein, 9 aa, synthetic construct
GWFTYDKQQ

SEQ ID NO: 1262 - protein, 9 aa, synthetic construct
GWHILPVME

SEQ ID NO: 1263 - protein, 9 aa, synthetic construct
GWIFITGAD

SEQ ID NO: 1264 - protein, 9 aa, synthetic construct
GWKHICVHG

SEQ ID NO: 1265 - protein, 9 aa, synthetic construct
GWNNRDSGP

SEQ ID NO: 1266 - protein, 9 aa, synthetic construct
GWNQHHSSE

SEQ ID NO: 1267 - protein, 9 aa, synthetic construct
GWVQSMCMS

SEQ ID NO: 1268 - protein, 9 aa, synthetic construct
GWYSLAVAN

SEQ ID NO: 1269 - protein, 9 aa, synthetic construct
GYCMRLFGI

SEQ ID NO: 1270 - protein, 9 aa, synthetic construct
GYCPCFHAG

SEQ ID NO: 1271 - protein, 9 aa, synthetic construct
GYERADCWM

SEQ ID NO: 1272 - protein, 9 aa, synthetic construct
GYESFLRDQ

SEQ ID NO: 1273 - protein, 9 aa, synthetic construct
GYIPTQSMY

SEQ ID NO: 1274 - protein, 9 aa, synthetic construct
GYISYGTQE

SEQ ID NO: 1275 - protein, 9 aa, synthetic construct
GYKMMDCSM

SEQ ID NO: 1276 - protein, 9 aa, synthetic construct
GYLSFMHNN

SEQ ID NO: 1277 - protein, 9 aa, synthetic construct
GYMQTLEGL

SEQ ID NO: 1278 - protein, 9 aa, synthetic construct
GYQNFLDYF

SEQ ID NO: 1279 - protein, 9 aa, synthetic construct
GYTSMITHV

SEQ ID NO: 1280 - protein, 9 aa, synthetic construct
GYVQQSKGE

SEQ ID NO: 1281 - protein, 9 aa, synthetic construct
GYVWLGAMP

SEQ ID NO: 1282 - protein, 9 aa, synthetic construct
HAALYTNQN

SEQ ID NO: 1283 - protein, 9 aa, synthetic construct
HAAPGMIHS

SEQ ID NO: 1284 - protein, 9 aa, synthetic construct
HACFNHFPC

SEQ ID NO: 1285 - protein, 9 aa, synthetic construct
HACLMYWYD

SEQ ID NO: 1286 - protein, 9 aa, synthetic construct
HAEELGDCY

SEQ ID NO: 1287 - protein, 9 aa, synthetic construct
HAEIQGHQE

SEQ ID NO: 1288 - protein, 9 aa, synthetic construct
HAELLGAFE

SEQ ID NO: 1289 - protein, 9 aa, synthetic construct
HAHVFIWYA

SEQ ID NO: 1290 - protein, 9 aa, synthetic construct
HAHVFIWYT

SEQ ID NO: 1291 - protein, 9 aa, synthetic construct
HAILLDEMR

SEQ ID NO: 1292 - protein, 9 aa, synthetic construct
HAISIWQTN

SEQ ID NO: 1293 - protein, 9 aa, synthetic construct
HAKLFPTMI

SEQ ID NO: 1294 - protein, 9 aa, synthetic construct
HASAMECIS

SEQ ID NO: 1295 - protein, 9 aa, synthetic construct
HASGFMMQS

SEQ ID NO: 1296 - protein, 9 aa, synthetic construct
HASTAIMCP

SEQ ID NO: 1297 - protein, 9 aa, synthetic construct
HATPVCKEY

SEQ ID NO: 1298 - protein, 9 aa, synthetic construct
HATTCDFDF

SEQ ID NO: 1299 - protein, 9 aa, synthetic construct
HAYPILQMD

SEQ ID NO: 1300 - protein, 9 aa, synthetic construct
HCAMTQRFD

SEQ ID NO: 1301 - protein, 9 aa, synthetic construct
HCAVCQWQA

SEQ ID NO: 1302 - protein, 9 aa, synthetic construct
HCETFMMQF

SEQ ID NO: 1303 - protein, 9 aa, synthetic construct
HCNFDIPGA

SEQ ID NO: 1304 - protein, 9 aa, synthetic construct
HCQPFTGHV

SEQ ID NO: 1305 - protein, 9 aa, synthetic construct
HCSLYAQER

SEQ ID NO: 1306 - protein, 9 aa, synthetic construct
HCSNVEFYQ

SEQ ID NO: 1307 - protein, 9 aa, synthetic construct
HCSPNNCLE

SEQ ID NO: 1308 - protein, 9 aa, synthetic construct
HCSPNNCPE

SEQ ID NO: 1309 - protein, 9 aa, synthetic construct
HCVEFMQSN

SEQ ID NO: 1310 - protein, 9 aa, synthetic construct
HDDAQLDNS

SEQ ID NO: 1311 - protein, 9 aa, synthetic construct
HDEAQLDNS

SEQ ID NO: 1312 - protein, 9 aa, synthetic construct
HDFDNPSMY

SEQ ID NO: 1313 - protein, 9 aa, synthetic construct
HDGPSAKPN

SEQ ID NO: 1314 - protein, 9 aa, synthetic construct
HDHTPLQSP

SEQ ID NO: 1315 - protein, 9 aa, synthetic construct
HDNSAMWMV

SEQ ID NO: 1316 - protein, 9 aa, synthetic construct
HDTMEWGCH

SEQ ID NO: 1317 - protein, 9 aa, synthetic construct
HDTMEWGFH

SEQ ID NO: 1318 - protein, 9 aa, synthetic construct
HECWQMTND

SEQ ID NO: 1319 - protein, 9 aa, synthetic construct
HESMAWTLL

SEQ ID NO: 1320 - protein, 9 aa, synthetic construct
HFCQYQSST

SEQ ID NO: 1321 - protein, 9 aa, synthetic construct
HFDNYQRFC

SEQ ID NO: 1322 - protein, 9 aa, synthetic construct
HFFHNMDYH

SEQ ID NO: 1323 - protein, 9 aa, synthetic construct
HFGPTNCSM

SEQ ID NO: 1324 - protein, 9 aa, synthetic construct
HFHQNFHFF

SEQ ID NO: 1325 - protein, 9 aa, synthetic construct
HFMEMLING

SEQ ID NO: 1326 - protein, 9 aa, synthetic construct
HFWMMECSG

SEQ ID NO: 1327 - protein, 9 aa, synthetic construct
HFWVINGYE

SEQ ID NO: 1328 - protein, 9 aa, synthetic construct
HGCPHFASG

SEQ ID NO: 1329 - protein, 9 aa, synthetic construct
HGLTIGAAT

SEQ ID NO: 1330 - protein, 9 aa, synthetic construct
HGSLLSTCH

SEQ ID NO: 1331 - protein, 9 aa, synthetic construct
HHDSCYVVP

SEQ ID NO: 1332 - protein, 9 aa, synthetic construct
HHESHLCGY

SEQ ID NO: 1333 - protein, 9 aa, synthetic construct
HHQHVDNHG

SEQ ID NO: 1334 - protein, 9 aa, synthetic construct
HHQWLRVME

SEQ ID NO: 1335 - protein, 9 aa, synthetic construct
HHWPQTPLL

SEQ ID NO: 1336 - protein, 9 aa, synthetic construct
HIANNFDWE

SEQ ID NO: 1337 - protein, 9 aa, synthetic construct
HIAQCDVYL

SEQ ID NO: 1338 - protein, 9 aa, synthetic construct
HIDDWAHGR

SEQ ID NO: 1339 - protein, 9 aa, synthetic construct
HIDLMQMEY

SEQ ID NO: 1340 - protein, 9 aa, synthetic construct
HIENKYAHI

SEQ ID NO: 1341 - protein, 9 aa, synthetic construct
HIEVCTLGD

SEQ ID NO: 1342 - protein, 9 aa, synthetic construct
HIFMDEMAY

SEQ ID NO: 1343 - protein, 9 aa, synthetic construct
HIGYKDSLS

SEQ ID NO: 1344 - protein, 9 aa, synthetic construct
HILIMQGVS

SEQ ID NO: 1345 - protein, 9 aa, synthetic construct
HIQEELEEQ

SEQ ID NO: 1346 - protein, 9 aa, synthetic construct
HISEFNRCT

SEQ ID NO: 1347 - protein, 9 aa, synthetic construct
HISFCSEYW

SEQ ID NO: 1348 - protein, 9 aa, synthetic construct
HIVQCDVIL

SEQ ID NO: 1349 - protein, 9 aa, synthetic construct
HIYFQEAQS

SEQ ID NO: 1350 - protein, 9 aa, synthetic construct
HKGTHAFVM

SEQ ID NO: 1351 - protein, 9 aa, synthetic construct
HKYCRLSEE

SEQ ID NO: 1352 - protein, 9 aa, synthetic construct
HLAPYCQQE

SEQ ID NO: 1353 - protein, 9 aa, synthetic construct
HLDDIISFN

SEQ ID NO: 1354 - protein, 9 aa, synthetic construct
HLGMWLAPV

SEQ ID NO: 1355 - protein, 9 aa, synthetic construct
HLQVCNIYH

SEQ ID NO: 1356 - protein, 9 aa, synthetic construct
HLSFNNWCR

SEQ ID NO: 1357 - protein, 9 aa, synthetic construct
HMATLAHEA

SEQ ID NO: 1358 - protein, 9 aa, synthetic construct
HMVIHAIPD

SEQ ID NO: 1359 - protein, 9 aa, synthetic construct
HMVTLAHGA

SEQ ID NO: 1360 - protein, 9 aa, synthetic construct
HNASNHECT

SEQ ID NO: 1361 - protein, 9 aa, synthetic construct
HNEDLGDCY

SEQ ID NO: 1362 - protein, 9 aa, synthetic construct
HNENTHWFN

SEQ ID NO: 1363 - protein, 9 aa, synthetic construct
HNGCLMDVA

SEQ ID NO: 1364 - protein, 9 aa, synthetic construct
HPHDTMKLT

SEQ ID NO: 1365 - protein, 9 aa, synthetic construct
HPVCCLEQA

SEQ ID NO: 1366 - protein, 9 aa, synthetic construct
HPYTAKWDV

SEQ ID NO: 1367 - protein, 9 aa, synthetic construct
HQEVNPTPA

SEQ ID NO: 1368 - protein, 9 aa, synthetic construct
HQEYFDANQ

SEQ ID NO: 1369 - protein, 9 aa, synthetic construct
HQISVNNTL

SEQ ID NO: 1370 - protein, 9 aa, synthetic construct
HQMEYSDFL

SEQ ID NO: 1371 - protein, 9 aa, synthetic construct
HQMEYSDLL

SEQ ID NO: 1372 - protein, 9 aa, synthetic construct
HQVQKYRMC

SEQ ID NO: 1373 - protein, 9 aa, synthetic construct
HRDYFFTYD

SEQ ID NO: 1374 - protein, 9 aa, synthetic construct
HSASGICCN

SEQ ID NO: 1375 - protein, 9 aa, synthetic construct
HSCGTYYWA

SEQ ID NO: 1376 - protein, 9 aa, synthetic construct
HSEMSNILM

SEQ ID NO: 1377 - protein, 9 aa, synthetic construct
HSFEKKIPL

SEQ ID NO: 1378 - protein, 9 aa, synthetic construct
HSVVVYEHA

SEQ ID NO: 1379 - protein, 9 aa, synthetic construct
HSWINNQEH

SEQ ID NO: 1380 - protein, 9 aa, synthetic construct
HTAQTYSTN

SEQ ID NO: 1381 - protein, 9 aa, synthetic construct
HTEAHLSAC

SEQ ID NO: 1382 - protein, 9 aa, synthetic construct
HTECDIQQK

SEQ ID NO: 1383 - protein, 9 aa, synthetic construct
HTECKTIMH

SEQ ID NO: 1384 - protein, 9 aa, synthetic construct
HTGCLLDVA

SEQ ID NO: 1385 - protein, 9 aa, synthetic construct
HTIEGKHMN

SEQ ID NO: 1386 - protein, 9 aa, synthetic construct
HTIHYGEAS

SEQ ID NO: 1387 - protein, 9 aa, synthetic construct
HTINMPRWV

SEQ ID NO: 1388 - protein, 9 aa, synthetic construct
HTMDYNTCR

SEQ ID NO: 1389 - protein, 9 aa, synthetic construct
HTNQMWGMF

SEQ ID NO: 1390 - protein, 9 aa, synthetic construct
HTNSYMEIE

SEQ ID NO: 1391 - protein, 9 aa, synthetic construct
HTNYMQKEY

SEQ ID NO: 1392 - protein, 9 aa, synthetic construct
HTQLKNCTG

SEQ ID NO: 1393 - protein, 9 aa, synthetic construct
HTSFTNCEC

SEQ ID NO: 1394 - protein, 9 aa, synthetic construct
HTSHQGHAE

SEQ ID NO: 1395 - protein, 9 aa, synthetic construct
HTSLDSWFN

SEQ ID NO: 1396 - protein, 9 aa, synthetic construct
HTTLCDPCG

SEQ ID NO: 1397 - protein, 9 aa, synthetic construct
HTTNYGEAS

SEQ ID NO: 1398 - protein, 9 aa, synthetic construct
HVAVNGFYD

SEQ ID NO: 1399 - protein, 9 aa, synthetic construct
HVDGIWRDQ

SEQ ID NO: 1400 - protein, 9 aa, synthetic construct
HVDQSLKYG

SEQ ID NO: 1401 - protein, 9 aa, synthetic construct
HVELNMKGV

SEQ ID NO: 1402 - protein, 9 aa, synthetic construct
HVEVPNTDA

SEQ ID NO: 1403 - protein, 9 aa, synthetic construct
HVFQEGCCI

SEQ ID NO: 1404 - protein, 9 aa, synthetic construct
HVGTDCMAA

SEQ ID NO: 1405 - protein, 9 aa, synthetic construct
HVHQALTIS

SEQ ID NO: 1406 - protein, 9 aa, synthetic construct
HVKVPNTDA

SEQ ID NO: 1407 - protein, 9 aa, synthetic construct
HVLNGTGGS

SEQ ID NO: 1408 - protein, 9 aa, synthetic construct
HVMPYMWVG

SEQ ID NO: 1409 - protein, 9 aa, synthetic construct
HVMQYMWPG

SEQ ID NO: 1410 - protein, 9 aa, synthetic construct
HVMRYYEPY

SEQ ID NO: 1411 - protein, 9 aa, synthetic construct
HVNTYQLRG

SEQ ID NO: 1412 - protein, 9 aa, synthetic construct
HVSAMECIS

SEQ ID NO: 1413 - protein, 9 aa, synthetic construct
HVSPIQDNM

SEQ ID NO: 1414 - protein, 9 aa, synthetic construct
HWLSCEKRW

SEQ ID NO: 1415 - protein, 9 aa, synthetic construct
HWTLCDPEG

SEQ ID NO: 1416 - protein, 9 aa, synthetic construct
HWVSTLADY

SEQ ID NO: 1417 - protein, 9 aa, synthetic construct
HYAEITYRQ

SEQ ID NO: 1418 - protein, 9 aa, synthetic construct
HYCPCHNKY

SEQ ID NO: 1419 - protein, 9 aa, synthetic construct
HYDLSTCAL

SEQ ID NO: 1420 - protein, 9 aa, synthetic construct
HYEWADHQW

SEQ ID NO: 1421 - protein, 9 aa, synthetic construct
HYMQRKEWR

SEQ ID NO: 1422 - protein, 9 aa, synthetic construct
HYTEVQKTP

SEQ ID NO: 1423 - protein, 9 aa, synthetic construct
HYVALDAGS

SEQ ID NO: 1424 - protein, 9 aa, synthetic construct
HYVMFQMSN

SEQ ID NO: 1425 - protein, 9 aa, synthetic construct
HYVSMMLDE

SEQ ID NO: 1426 - protein, 9 aa, synthetic construct
HYVVRHEDP

SEQ ID NO: 1427 - protein, 9 aa, synthetic construct
IAAQPITNE

SEQ ID NO: 1428 - protein, 9 aa, synthetic construct
IACYEPVGS

SEQ ID NO: 1429 - protein, 9 aa, synthetic construct
IAEFLQCDY

SEQ ID NO: 1430 - protein, 9 aa, synthetic construct
IAHNNFEPT

SEQ ID NO: 1431 - protein, 9 aa, synthetic construct
IAHVVEQMG

SEQ ID NO: 1432 - protein, 9 aa, synthetic construct
IALSATKDK

SEQ ID NO: 1433 - protein, 9 aa, synthetic construct
IANVNNGTH

SEQ ID NO: 1434 - protein, 9 aa, synthetic construct
IATKSGLYH

SEQ ID NO: 1435 - protein, 9 aa, synthetic construct
IATLHMLSN

SEQ ID NO: 1436 - protein, 9 aa, synthetic construct
IATWMWKYS

SEQ ID NO: 1437 - protein, 9 aa, synthetic construct
IAYHTKSTI

SEQ ID NO: 1438 - protein, 9 aa, synthetic construct
ICACFNKAY

SEQ ID NO: 1439 - protein, 9 aa, synthetic construct
ICGFFCQQQ

SEQ ID NO: 1440 - protein, 9 aa, synthetic construct
ICIQSNGRE

SEQ ID NO: 1441 - protein, 9 aa, synthetic construct
ICLLEAGEK

SEQ ID NO: 1442 - protein, 9 aa, synthetic construct
ICMQNAMSW

SEQ ID NO: 1443 - protein, 9 aa, synthetic construct
ICMWKQYCS

SEQ ID NO: 1444 - protein, 9 aa, synthetic construct
ICQHNGVAY

SEQ ID NO: 1445 - protein, 9 aa, synthetic construct
ICREQIKWM

SEQ ID NO: 1446 - protein, 9 aa, synthetic construct
ICRYALLHA

SEQ ID NO: 1447 - protein, 9 aa, synthetic construct
ICSHSWFQA

SEQ ID NO: 1448 - protein, 9 aa, synthetic construct
IDAWGHFSE

SEQ ID NO: 1449 - protein, 9 aa, synthetic construct
IDDFRIVMH

SEQ ID NO: 1450 - protein, 9 aa, synthetic construct
IDEQCKFGH

SEQ ID NO: 1451 - protein, 9 aa, synthetic construct
IECSPREYI

SEQ ID NO: 1452 - protein, 9 aa, synthetic construct
IEDVWECPY

SEQ ID NO: 1453 - protein, 9 aa, synthetic construct
IEQQGSPLL

SEQ ID NO: 1454 - protein, 9 aa, synthetic construct
IEYCQGMNF

SEQ ID NO: 1455 - protein, 9 aa, synthetic construct
IEYYPTAEQ

SEQ ID NO: 1456 - protein, 9 aa, synthetic construct
IFAHSNCCE

SEQ ID NO: 1457 - protein, 9 aa, synthetic construct
IFALFDRYN

SEQ ID NO: 1458 - protein, 9 aa, synthetic construct
IFENHDAAM

SEQ ID NO: 1459 - protein, 9 aa, synthetic construct
IFILWQCKE

SEQ ID NO: 1460 - protein, 9 aa, synthetic construct
IFLSKIPCQ

SEQ ID NO: 1461 - protein, 9 aa, synthetic construct
IFNTRFLRE

SEQ ID NO: 1462 - protein, 9 aa, synthetic construct
IFSSGGADA

SEQ ID NO: 1463 - protein, 9 aa, synthetic construct
IFSSGGAYE

SEQ ID NO: 1464 - protein, 9 aa, synthetic construct
IFTAKNEEM

SEQ ID NO: 1465 - protein, 9 aa, synthetic construct
IFVIKQQCI

SEQ ID NO: 1466 - protein, 9 aa, synthetic construct
IFVIYHQSG

SEQ ID NO: 1467 - protein, 9 aa, synthetic construct
IFYAGDCTF

SEQ ID NO: 1468 - protein, 9 aa, synthetic construct
IGAEQKVGI

SEQ ID NO: 1469 - protein, 9 aa, synthetic construct
IGCLAVNHI

SEQ ID NO: 1470 - protein, 9 aa, synthetic construct
IGGIIGNWG

SEQ ID NO: 1471 - protein, 9 aa, synthetic construct
IGLSRNSNG

SEQ ID NO: 1472 - protein, 9 aa, synthetic construct
IGQRIAGYA

SEQ ID NO: 1473 - protein, 9 aa, synthetic construct
IGVERDYYA

SEQ ID NO: 1474 - protein, 9 aa, synthetic construct
IGYQIMDME

SEQ ID NO: 1475 - protein, 9 aa, synthetic construct
IHCDIQCQF

SEQ ID NO: 1476 - protein, 9 aa, synthetic construct
IHEFHIAAM

SEQ ID NO: 1477 - protein, 9 aa, synthetic construct
IHNFYYAST

SEQ ID NO: 1478 - protein, 9 aa, synthetic construct
IHNHYTACQ

SEQ ID NO: 1479 - protein, 9 aa, synthetic construct
IHQSFQQWE

SEQ ID NO: 1480 - protein, 9 aa, synthetic construct
IHSQCQQGQ

SEQ ID NO: 1481 - protein, 9 aa, synthetic construct
IHSYKDAHL

SEQ ID NO: 1482 - protein, 9 aa, synthetic construct
IHTQTLISE

SEQ ID NO: 1483 - protein, 9 aa, synthetic construct
IIAQQMRHH

SEQ ID NO: 1484 - protein, 9 aa, synthetic construct
IIGSCQSFY

SEQ ID NO: 1485 - protein, 9 aa, synthetic construct
IIHLPDHCR

SEQ ID NO: 1486 - protein, 9 aa, synthetic construct
IILQNMKSW

SEQ ID NO: 1487 - protein, 9 aa, synthetic construct
IIMQNMMSW

SEQ ID NO: 1488 - protein, 9 aa, synthetic construct
IIPQKCSNP

SEQ ID NO: 1489 - protein, 9 aa, synthetic construct
IISECQFGG

SEQ ID NO: 1490 - protein, 9 aa, synthetic construct
IITCMDGYF

SEQ ID NO: 1491 - protein, 9 aa, synthetic construct
IITMDLCTD

SEQ ID NO: 1492 - protein, 9 aa, synthetic construct
IIWLGSIRN

SEQ ID NO: 1493 - protein, 9 aa, synthetic construct
IIYHRTNAS

SEQ ID NO: 1494 - protein, 9 aa, synthetic construct
IIYQLDCAT

SEQ ID NO: 1495 - protein, 9 aa, synthetic construct
IKDHYIMQE

SEQ ID NO: 1496 - protein, 9 aa, synthetic construct
IKQVFNQIA

SEQ ID NO: 1497 - protein, 9 aa, synthetic construct
IKTNDQALL

SEQ ID NO: 1498 - protein, 9 aa, synthetic construct
IKVQIDQIE

SEQ ID NO: 1499 - protein, 9 aa, synthetic construct
ILAKWEVCE

SEQ ID NO: 1500 - protein, 9 aa, synthetic construct
ILEQFYKMG

SEQ ID NO: 1501 - protein, 9 aa, synthetic construct
ILERHLCGF

SEQ ID NO: 1502 - protein, 9 aa, synthetic construct
ILHLEHPSD

SEQ ID NO: 1503 - protein, 9 aa, synthetic construct
ILPFFCCGL

SEQ ID NO: 1504 - protein, 9 aa, synthetic construct
ILRCVCDYP

SEQ ID NO: 1505 - protein, 9 aa, synthetic construct
ILSFYWGDY

SEQ ID NO: 1506 - protein, 9 aa, synthetic construct
ILTKWEVCE

SEQ ID NO: 1507 - protein, 9 aa, synthetic construct
IMASVDICA

SEQ ID NO: 1508 - protein, 9 aa, synthetic construct
IMCYKMCEF

SEQ ID NO: 1509 - protein, 9 aa, synthetic construct
IMDEIHYMM

SEQ ID NO: 1510 - protein, 9 aa, synthetic construct
IMDLITYAQ

SEQ ID NO: 1511 - protein, 9 aa, synthetic construct
IMDMIYDCG

SEQ ID NO: 1512 - protein, 9 aa, synthetic construct
IMDSRLTVA

SEQ ID NO: 1513 - protein, 9 aa, synthetic construct
IMETADCHM

SEQ ID NO: 1514 - protein, 9 aa, synthetic construct
IMGLGMRAD

SEQ ID NO: 1515 - protein, 9 aa, synthetic construct
IMGLRMRAD

SEQ ID NO: 1516 - protein, 9 aa, synthetic construct
IMGPAMNYD

SEQ ID NO: 1517 - protein, 9 aa, synthetic construct
IMMANQLSC

SEQ ID NO: 1518 - protein, 9 aa, synthetic construct
IMTPLAGGH

SEQ ID NO: 1519 - protein, 9 aa, synthetic construct
IMTPLASGH

SEQ ID NO: 1520 - protein, 9 aa, synthetic construct
IMTTENAAP

SEQ ID NO: 1521 - protein, 9 aa, synthetic construct
IMVERWQHA

SEQ ID NO: 1522 - protein, 9 aa, synthetic construct
INCQTQKEM

SEQ ID NO: 1523 - protein, 9 aa, synthetic construct
INDHAQIVK

SEQ ID NO: 1524 - protein, 9 aa, synthetic construct
INEDAQEKM

SEQ ID NO: 1525 - protein, 9 aa, synthetic construct
INGSRACSY

SEQ ID NO: 1526 - protein, 9 aa, synthetic construct
INMVSMYAY

SEQ ID NO: 1527 - protein, 9 aa, synthetic construct
IPALKEGQI

SEQ ID NO: 1528 - protein, 9 aa, synthetic construct
IPAPIHVNA

SEQ ID NO: 1529 - protein, 9 aa, synthetic construct
IPDLHDHMG

SEQ ID NO: 1530 - protein, 9 aa, synthetic construct
IPGTMSHTA

SEQ ID NO: 1531 - protein, 9 aa, synthetic construct
IPLAMALWT

SEQ ID NO: 1532 - protein, 9 aa, synthetic construct
IPMGWEFPE

SEQ ID NO: 1533 - protein, 9 aa, synthetic construct
IPTMQWWNE

SEQ ID NO: 1534 - protein, 9 aa, synthetic construct
IPWMERSAS

SEQ ID NO: 1535 - protein, 9 aa, synthetic construct
IQEHLNACE

SEQ ID NO: 1536 - protein, 9 aa, synthetic construct
IQLGCSAFH

SEQ ID NO: 1537 - protein, 9 aa, synthetic construct
IQQQMSMCG

SEQ ID NO: 1538 - protein, 9 aa, synthetic construct
IRDMFEQYT

SEQ ID NO: 1539 - protein, 9 aa, synthetic construct
IREPTEPYC

SEQ ID NO: 1540 - protein, 9 aa, synthetic construct
IRLMTPDEN

SEQ ID NO: 1541 - protein, 9 aa, synthetic construct
IRLPMNSAH

SEQ ID NO: 1542 - protein, 9 aa, synthetic construct
IRSMSNIME

SEQ ID NO: 1543 - protein, 9 aa, synthetic construct
IRTLFNITA

SEQ ID NO: 1544 - protein, 9 aa, synthetic construct
IRTNPWFHE

SEQ ID NO: 1545 - protein, 9 aa, synthetic construct
ISDCVVWTY

SEQ ID NO: 1546 - protein, 9 aa, synthetic construct
ISDLGIMWI

SEQ ID NO: 1547 - protein, 9 aa, synthetic construct
ISEEIVSFE

SEQ ID NO: 1548 - protein, 9 aa, synthetic construct
ISEGQAESR

SEQ ID NO: 1549 - protein, 9 aa, synthetic construct
ISELFGAAF

SEQ ID NO: 1550 - protein, 9 aa, synthetic construct
ISELFGEAE

SEQ ID NO: 1551 - protein, 9 aa, synthetic construct
ISFGMEAMS

SEQ ID NO: 1552 - protein, 9 aa, synthetic construct
ISGEGHQAV

SEQ ID NO: 1553 - protein, 9 aa, synthetic construct
ISGHAQVQP

SEQ ID NO: 1554 - protein, 9 aa, synthetic construct
ISGNAWGSL

SEQ ID NO: 1555 - protein, 9 aa, synthetic construct
ISGWRMPCD

SEQ ID NO: 1556 - protein, 9 aa, synthetic construct
ISNLLCWCP

SEQ ID NO: 1557 - protein, 9 aa, synthetic construct
ISNPLYQVS

SEQ ID NO: 1558 - protein, 9 aa, synthetic construct
ISQEYVSLQ

SEQ ID NO: 1559 - protein, 9 aa, synthetic construct
ISQHNTFCS

SEQ ID NO: 1560 - protein, 9 aa, synthetic construct
ISQVDWKCH

SEQ ID NO: 1561 - protein, 9 aa, synthetic construct
ISRSKDAGM

SEQ ID NO: 1562 - protein, 9 aa, synthetic construct
ISSGCWQFD

SEQ ID NO: 1563 - protein, 9 aa, synthetic construct
ISVGQWEFI

SEQ ID NO: 1564 - protein, 9 aa, synthetic construct
ISVIQPQFA

SEQ ID NO: 1565 - protein, 9 aa, synthetic construct
ISYFTMAAQ

SEQ ID NO: 1566 - protein, 9 aa, synthetic construct
ISYSSFDCH

SEQ ID NO: 1567 - protein, 9 aa, synthetic construct
ITCSNHAMM

SEQ ID NO: 1568 - protein, 9 aa, synthetic construct
ITDLLNVWG

SEQ ID NO: 1569 - protein, 9 aa, synthetic construct
ITDQLCHSE

SEQ ID NO: 1570 - protein, 9 aa, synthetic construct
ITEHVNFVT

SEQ ID NO: 1571 - protein, 9 aa, synthetic construct
ITEVRQECA

SEQ ID NO: 1572 - protein, 9 aa, synthetic construct
ITHKSETMM

SEQ ID NO: 1573 - protein, 9 aa, synthetic construct
ITHSMGDNM

SEQ ID NO: 1574 - protein, 9 aa, synthetic construct
ITHVSGSQL

SEQ ID NO: 1575 - protein, 9 aa, synthetic construct
ITIYELDSG

SEQ ID NO: 1576 - protein, 9 aa, synthetic construct
ITLASKSMR

SEQ ID NO: 1577 - protein, 9 aa, synthetic construct
ITMGPEKWG

SEQ ID NO: 1578 - protein, 9 aa, synthetic construct
ITMQSHFQH

SEQ ID NO: 1579 - protein, 9 aa, synthetic construct
ITNKTFNDN

SEQ ID NO: 1580 - protein, 9 aa, synthetic construct
ITNPFFLDN

SEQ ID NO: 1581 - protein, 9 aa, synthetic construct
ITQDANLPL

SEQ ID NO: 1582 - protein, 9 aa, synthetic construct
ITTQQAGQT

SEQ ID NO: 1583 - protein, 9 aa, synthetic construct
IVAVNGFWD

SEQ ID NO: 1584 - protein, 9 aa, synthetic construct
IVCESIQVH

SEQ ID NO: 1585 - protein, 9 aa, synthetic construct
IVCTIAGTQ

SEQ ID NO: 1586 - protein, 9 aa, synthetic construct
IVDYYMEGG

SEQ ID NO: 1587 - protein, 9 aa, synthetic construct
IVHFGSSWK

SEQ ID NO: 1588 - protein, 9 aa, synthetic construct
IVHWLSWMP

SEQ ID NO: 1589 - protein, 9 aa, synthetic construct
IVIWQGEWI

SEQ ID NO: 1590 - protein, 9 aa, synthetic construct
IVKSEGQKA

SEQ ID NO: 1591 - protein, 9 aa, synthetic construct
IVLPENHLG

SEQ ID NO: 1592 - protein, 9 aa, synthetic construct
IVMKGQEIT

SEQ ID NO: 1593 - protein, 9 aa, synthetic construct
IVMNSKQMS

SEQ ID NO: 1594 - protein, 9 aa, synthetic construct
IVMSCFDAD

SEQ ID NO: 1595 - protein, 9 aa, synthetic construct
IVNHVPGRG

SEQ ID NO: 1596 - protein, 9 aa, synthetic construct
IVQAHMMMS

SEQ ID NO: 1597 - protein, 9 aa, synthetic construct
IVQMDGASF

SEQ ID NO: 1598 - protein, 9 aa, synthetic construct
IVQRDGASC

SEQ ID NO: 1599 - protein, 9 aa, synthetic construct
IVSKEVEAD

SEQ ID NO: 1600 - protein, 9 aa, synthetic construct
IVTGHLQEG

SEQ ID NO: 1601 - protein, 9 aa, synthetic construct
IVYCQGSSF

SEQ ID NO: 1602 - protein, 9 aa, synthetic construct
IWRDSLHAN

SEQ ID NO: 1603 - protein, 9 aa, synthetic construct
IYEWMQCSH

SEQ ID NO: 1604 - protein, 9 aa, synthetic construct
IYKWDNKFH

SEQ ID NO: 1605 - protein, 9 aa, synthetic construct
IYLHKDAFG

SEQ ID NO: 1606 - protein, 9 aa, synthetic construct
IYLKAQQDP

SEQ ID NO: 1607 - protein, 9 aa, synthetic construct
IYMSSVCHC

SEQ ID NO: 1608 - protein, 9 aa, synthetic construct
IYPLQSFCN

SEQ ID NO: 1609 - protein, 9 aa, synthetic construct
IYSHFHQGQ

SEQ ID NO: 1610 - protein, 9 aa, synthetic construct
IYTRMDGYF

SEQ ID NO: 1611 - protein, 9 aa, synthetic construct
IYVDLVDSL

SEQ ID NO: 1612 - protein, 9 aa, synthetic construct
IYWFHPKGG

SEQ ID NO: 1613 - protein, 9 aa, synthetic construct
IYYQIAEHF

SEQ ID NO: 1614 - protein, 9 aa, synthetic construct
KAANDHHVA

SEQ ID NO: 1615 - protein, 9 aa, synthetic construct
KACPYYDEW

SEQ ID NO: 1616 - protein, 9 aa, synthetic construct
KADTEHNTN

SEQ ID NO: 1617 - protein, 9 aa, synthetic construct
KAIHNMYGP

SEQ ID NO: 1618 - protein, 9 aa, synthetic construct
KAREDLWRE

SEQ ID NO: 1619 - protein, 9 aa, synthetic construct
KATVEFEWP

SEQ ID NO: 1620 - protein, 9 aa, synthetic construct
KAYSLESDG

SEQ ID NO: 1621 - protein, 9 aa, synthetic construct
KCALYEYEV

SEQ ID NO: 1622 - protein, 9 aa, synthetic construct
KCDVLYTCQ

SEQ ID NO: 1623 - protein, 9 aa, synthetic construct
KCEAGMFCY

SEQ ID NO: 1624 - protein, 9 aa, synthetic construct
KCEELKTME

SEQ ID NO: 1625 - protein, 9 aa, synthetic construct
KCEGHHYVE

SEQ ID NO: 1626 - protein, 9 aa, synthetic construct
KCESGIFCY

SEQ ID NO: 1627 - protein, 9 aa, synthetic construct
KCLEGVNFT

SEQ ID NO: 1628 - protein, 9 aa, synthetic construct
KCWITEDAN

SEQ ID NO: 1629 - protein, 9 aa, synthetic construct
KDHDPGNWQ

SEQ ID NO: 1630 - protein, 9 aa, synthetic construct
KEMDSITCF

SEQ ID NO: 1631 - protein, 9 aa, synthetic construct
KENAFENAA

SEQ ID NO: 1632 - protein, 9 aa, synthetic construct
KENAFENAS

SEQ ID NO: 1633 - protein, 9 aa, synthetic construct
KFELSSMIQ

SEQ ID NO: 1634 - protein, 9 aa, synthetic construct
KFGVTDTSE

SEQ ID NO: 1635 - protein, 9 aa, synthetic construct
KFMTCDLHN

SEQ ID NO: 1636 - protein, 9 aa, synthetic construct
KFMTSDLPN

SEQ ID NO: 1637 - protein, 9 aa, synthetic construct
KFNEETPFG

SEQ ID NO: 1638 - protein, 9 aa, synthetic construct
KGISNWSFY

SEQ ID NO: 1639 - protein, 9 aa, synthetic construct
KGIWQGMDA

SEQ ID NO: 1640 - protein, 9 aa, synthetic construct
KGKSNWSFY

SEQ ID NO: 1641 - protein, 9 aa, synthetic construct
KGPCIMQGN

SEQ ID NO: 1642 - protein, 9 aa, synthetic construct
KGPRIIQGN

SEQ ID NO: 1643 - protein, 9 aa, synthetic construct
KHKWMVYGA

SEQ ID NO: 1644 - protein, 9 aa, synthetic construct
KHKWMVYHG

SEQ ID NO: 1645 - protein, 9 aa, synthetic construct
KHNEMIHWY

SEQ ID NO: 1646 - protein, 9 aa, synthetic construct
KIDVYDCIA

SEQ ID NO: 1647 - protein, 9 aa, synthetic construct
KIEDMMAQE

SEQ ID NO: 1648 - protein, 9 aa, synthetic construct
KIHDCDTQY

SEQ ID NO: 1649 - protein, 9 aa, synthetic construct
KIHDCQTFY

SEQ ID NO: 1650 - protein, 9 aa, synthetic construct
KIHESQTFY

SEQ ID NO: 1651 - protein, 9 aa, synthetic construct
KIIWRAVAC

SEQ ID NO: 1652 - protein, 9 aa, synthetic construct
KKEAKYRGY

SEQ ID NO: 1653 - protein, 9 aa, synthetic construct
KKIMVKRAF

SEQ ID NO: 1654 - protein, 9 aa, synthetic construct
KLAPWQQNC

SEQ ID NO: 1655 - protein, 9 aa, synthetic construct
KLEHNMLNP

SEQ ID NO: 1656 - protein, 9 aa, synthetic construct
KLEHNMLYP

SEQ ID NO: 1657 - protein, 9 aa, synthetic construct
KLELIMQPR

SEQ ID NO: 1658 - protein, 9 aa, synthetic construct
KLHWMCSFL

SEQ ID NO: 1659 - protein, 9 aa, synthetic construct
KMAFGSAGV

SEQ ID NO: 1660 - protein, 9 aa, synthetic construct
KMECFMDAH

SEQ ID NO: 1661 - protein, 9 aa, synthetic construct
KMEMYAKEW

SEQ ID NO: 1662 - protein, 9 aa, synthetic construct
KMESYDYSD

SEQ ID NO: 1663 - protein, 9 aa, synthetic construct
KMQLSEGVP

SEQ ID NO: 1664 - protein, 9 aa, synthetic construct
KMVDLQHSL

SEQ ID NO: 1665 - protein, 9 aa, synthetic construct
KMWIDKYFH

SEQ ID NO: 1666 - protein, 9 aa, synthetic construct
KMYYFYCNS

SEQ ID NO: 1667 - protein, 9 aa, synthetic construct
KNGNTDTSE

SEQ ID NO: 1668 - protein, 9 aa, synthetic construct
KNLTGVAHH

SEQ ID NO: 1669 - protein, 9 aa, synthetic construct
KNWNPWDSP

SEQ ID NO: 1670 - protein, 9 aa, synthetic construct
KPDEVHNLN

SEQ ID NO: 1671 - protein, 9 aa, synthetic construct
KPMEWQQHH

SEQ ID NO: 1672 - protein, 9 aa, synthetic construct
KPTLEWAHE

SEQ ID NO: 1673 - protein, 9 aa, synthetic construct
KQDAKERIW

SEQ ID NO: 1674 - protein, 9 aa, synthetic construct
KQDTEVLLG

SEQ ID NO: 1675 - protein, 9 aa, synthetic construct
KQDVSKWFK

SEQ ID NO: 1676 - protein, 9 aa, synthetic construct
KQDVSKWQC

SEQ ID NO: 1677 - protein, 9 aa, synthetic construct
KQLICDVHH

SEQ ID NO: 1678 - protein, 9 aa, synthetic construct
KQNDHTHMA

SEQ ID NO: 1679 - protein, 9 aa, synthetic construct
KQNIEQVLH

SEQ ID NO: 1680 - protein, 9 aa, synthetic construct
KRQAHNHYA

SEQ ID NO: 1681 - protein, 9 aa, synthetic construct
KSCCIDHQM

SEQ ID NO: 1682 - protein, 9 aa, synthetic construct
KSEPGFKNH

SEQ ID NO: 1683 - protein, 9 aa, synthetic construct
KSGIMENDE

SEQ ID NO: 1684 - protein, 9 aa, synthetic construct
KSGYGELSE

SEQ ID NO: 1685 - protein, 9 aa, synthetic construct
KSSSSYIWG

SEQ ID NO: 1686 - protein, 9 aa, synthetic construct
KSTGCPRGG

SEQ ID NO: 1687 - protein, 9 aa, synthetic construct
KSYPIFNEG

SEQ ID NO: 1688 - protein, 9 aa, synthetic construct
KTDQCNEAT

SEQ ID NO: 1689 - protein, 9 aa, synthetic construct
KTEQKLTPT

SEQ ID NO: 1690 - protein, 9 aa, synthetic construct
KTFLDVQSV

SEQ ID NO: 1691 - protein, 9 aa, synthetic construct
KTKYSNWRM

SEQ ID NO: 1692 - protein, 9 aa, synthetic construct
KTLPWYRPH

SEQ ID NO: 1693 - protein, 9 aa, synthetic construct
KTSHCEAMG

SEQ ID NO: 1694 - protein, 9 aa, synthetic construct
KTTHHWMTE

SEQ ID NO: 1695 - protein, 9 aa, synthetic construct
KTTPPWMTE

SEQ ID NO: 1696 - protein, 9 aa, synthetic construct
KVCSIVADH

SEQ ID NO: 1697 - protein, 9 aa, synthetic construct
KVDMLDIVD

SEQ ID NO: 1698 - protein, 9 aa, synthetic construct
KVEDVVLNE

SEQ ID NO: 1699 - protein, 9 aa, synthetic construct
KVEIKQMDQ

SEQ ID NO: 1700 - protein, 9 aa, synthetic construct
KVGMDQTAV

SEQ ID NO: 1701 - protein, 9 aa, synthetic construct
KVPKRAYFE

SEQ ID NO: 1702 - protein, 9 aa, synthetic construct
KVSQQEGIV

SEQ ID NO: 1703 - protein, 9 aa, synthetic construct
KVTTETGVP

SEQ ID NO: 1704 - protein, 9 aa, synthetic construct
KWDMICGYD

SEQ ID NO: 1705 - protein, 9 aa, synthetic construct
KWDNIMLMN

SEQ ID NO: 1706 - protein, 9 aa, synthetic construct
KWDYQMQMN

SEQ ID NO: 1707 - protein, 9 aa, synthetic construct
KWEWSKCYL

SEQ ID NO: 1708 - protein, 9 aa, synthetic construct
KWMPFDNTF

SEQ ID NO: 1709 - protein, 9 aa, synthetic construct
KWPVMANLH

SEQ ID NO: 1710 - protein, 9 aa, synthetic construct
KWTELCNLY

SEQ ID NO: 1711 - protein, 9 aa, synthetic construct
KWYSFSFRA

SEQ ID NO: 1712 - protein, 9 aa, synthetic construct
KYDTVAHWE

SEQ ID NO: 1713 - protein, 9 aa, synthetic construct
KYGESNQCQ

SEQ ID NO: 1714 - protein, 9 aa, synthetic construct
KYWISQDCA

SEQ ID NO: 1715 - protein, 9 aa, synthetic construct
LAATSAQCQ

SEQ ID NO: 1716 - protein, 9 aa, synthetic construct
LACKGTNPT

SEQ ID NO: 1717 - protein, 9 aa, synthetic construct
LACYKDGGV

SEQ ID NO: 1718 - protein, 9 aa, synthetic construct
LADRCQCCY

SEQ ID NO: 1719 - protein, 9 aa, synthetic construct
LAEFEDGGF

SEQ ID NO: 1720 - protein, 9 aa, synthetic construct
LAGLDSNTA

SEQ ID NO: 1721 - protein, 9 aa, synthetic construct
LAGPNHDHQ

SEQ ID NO: 1722 - protein, 9 aa, synthetic construct
LAHTYGRDT

SEQ ID NO: 1723 - protein, 9 aa, synthetic construct
LAHVSTQFN

SEQ ID NO: 1724 - protein, 9 aa, synthetic construct
LAIGAEIAL

SEQ ID NO: 1725 - protein, 9 aa, synthetic construct
LAIHEATYP

SEQ ID NO: 1726 - protein, 9 aa, synthetic construct
LAIREATYH

SEQ ID NO: 1727 - protein, 9 aa, synthetic construct
LAISLVDSY

SEQ ID NO: 1728 - protein, 9 aa, synthetic construct
LALPYDDFS

SEQ ID NO: 1729 - protein, 9 aa, synthetic construct
LAMYSQYRG

SEQ ID NO: 1730 - protein, 9 aa, synthetic construct
LAPPYTRSN

SEQ ID NO: 1731 - protein, 9 aa, synthetic construct
LASFWLNPQ

SEQ ID NO: 1732 - protein, 9 aa, synthetic construct
LASPSNESH

SEQ ID NO: 1733 - protein, 9 aa, synthetic construct
LATEHMSWD

SEQ ID NO: 1734 - protein, 9 aa, synthetic construct
LATHCYGGR

SEQ ID NO: 1735 - protein, 9 aa, synthetic construct
LATNTYAYS

SEQ ID NO: 1736 - protein, 9 aa, synthetic construct
LATVQTQAP

SEQ ID NO: 1737 - protein, 9 aa, synthetic construct
LAVSHANFF

SEQ ID NO: 1738 - protein, 9 aa, synthetic construct
LAWIETRDG

SEQ ID NO: 1739 - protein, 9 aa, synthetic construct
LAYLLGHKE

SEQ ID NO: 1740 - protein, 9 aa, synthetic construct
LAYYSLAFG

SEQ ID NO: 1741 - protein, 9 aa, synthetic construct
LCAPCGMSV

SEQ ID NO: 1742 - protein, 9 aa, synthetic construct
LCAQELYMC

SEQ ID NO: 1743 - protein, 9 aa, synthetic construct
LCAVCQLQA

SEQ ID NO: 1744 - protein, 9 aa, synthetic construct
LCAVWDKMD

SEQ ID NO: 1745 - protein, 9 aa, synthetic construct
LCELNSAWN

SEQ ID NO: 1746 - protein, 9 aa, synthetic construct
LCERFHEDT

SEQ ID NO: 1747 - protein, 9 aa, synthetic construct
LCFLMIMCD

SEQ ID NO: 1748 - protein, 9 aa, synthetic construct
LCFLMSNCD

SEQ ID NO: 1749 - protein, 9 aa, synthetic construct
LCGWAPCSW

SEQ ID NO: 1750 - protein, 9 aa, synthetic construct
LCMYSQYRS

SEQ ID NO: 1751 - protein, 9 aa, synthetic construct
LCTLVGMES

SEQ ID NO: 1752 - protein, 9 aa, synthetic construct
LCTMEGPYR

SEQ ID NO: 1753 - protein, 9 aa, synthetic construct
LCTNMMDMS

SEQ ID NO: 1754 - protein, 9 aa, synthetic construct
LCVGLSNCP

SEQ ID NO: 1755 - protein, 9 aa, synthetic construct
LDLAHSIPA

SEQ ID NO: 1756 - protein, 9 aa, synthetic construct
LDTKTLANS

SEQ ID NO: 1757 - protein, 9 aa, synthetic construct
LECQYHNFQ

SEQ ID NO: 1758 - protein, 9 aa, synthetic construct
LEDRISATF

SEQ ID NO: 1759 - protein, 9 aa, synthetic construct
LEGSSQFQD

SEQ ID NO: 1760 - protein, 9 aa, synthetic construct
LEHSSGFMN

SEQ ID NO: 1761 - protein, 9 aa, synthetic construct
LEVTNCNAA

SEQ ID NO: 1762 - protein, 9 aa, synthetic construct
LEWFCWIGS

SEQ ID NO: 1763 - protein, 9 aa, synthetic construct
LEWVCWSGS

SEQ ID NO: 1764 - protein, 9 aa, synthetic construct
LFAKPDALL

SEQ ID NO: 1765 - protein, 9 aa, synthetic construct
LFAVHMGYY

SEQ ID NO: 1766 - protein, 9 aa, synthetic construct
LFCNIGKTF

SEQ ID NO: 1767 - protein, 9 aa, synthetic construct
LFELTSVQN

SEQ ID NO: 1768 - protein, 9 aa, synthetic construct
LFEMTYRNW

SEQ ID NO: 1769 - protein, 9 aa, synthetic construct
LFEYYRRMA

SEQ ID NO: 1770 - protein, 9 aa, synthetic construct
LFGIAIWYV

SEQ ID NO: 1771 - protein, 9 aa, synthetic construct
LFHNAQDDR

SEQ ID NO: 1772 - protein, 9 aa, synthetic construct
LFHYIQRTS

SEQ ID NO: 1773 - protein, 9 aa, synthetic construct
LFIKVKDTS

SEQ ID NO: 1774 - protein, 9 aa, synthetic construct
LFKHCAHHN

SEQ ID NO: 1775 - protein, 9 aa, synthetic construct
LFKHMYENA

SEQ ID NO: 1776 - protein, 9 aa, synthetic construct
LFKPTQNEF

SEQ ID NO: 1777 - protein, 9 aa, synthetic construct
LFLGKDAMM

SEQ ID NO: 1778 - protein, 9 aa, synthetic construct
LFLHDNRFL

SEQ ID NO: 1779 - protein, 9 aa, synthetic construct
LFLQLYRHC

SEQ ID NO: 1780 - protein, 9 aa, synthetic construct
LFMPISSAV

SEQ ID NO: 1781 - protein, 9 aa, synthetic construct
LFMPVQRIC

SEQ ID NO: 1782 - protein, 9 aa, synthetic construct
LFMQNNNWM

SEQ ID NO: 1783 - protein, 9 aa, synthetic construct
LFMQSVQQT

SEQ ID NO: 1784 - protein, 9 aa, synthetic construct
LFNSYSTRE

SEQ ID NO: 1785 - protein, 9 aa, synthetic construct
LFQKMTYEP

SEQ ID NO: 1786 - protein, 9 aa, synthetic construct
LFQQTLRWQ

SEQ ID NO: 1787 - protein, 9 aa, synthetic construct
LFQQYNSPF

SEQ ID NO: 1788 - protein, 9 aa, synthetic construct
LFRVMYCQE

SEQ ID NO: 1789 - protein, 9 aa, synthetic construct
LFRYKTSLW

SEQ ID NO: 1790 - protein, 9 aa, synthetic construct
LFSFYNNTS

SEQ ID NO: 1791 - protein, 9 aa, synthetic construct
LFSHELRYY

SEQ ID NO: 1792 - protein, 9 aa, synthetic construct
LFSIMHAME

SEQ ID NO: 1793 - protein, 9 aa, synthetic construct
LFSQNEACS

SEQ ID NO: 1794 - protein, 9 aa, synthetic construct
LFTDTKRPE

SEQ ID NO: 1795 - protein, 9 aa, synthetic construct
LFTLVQSNS

SEQ ID NO: 1796 - protein, 9 aa, synthetic construct
LFVGMSCEL

SEQ ID NO: 1797 - protein, 9 aa, synthetic construct
LFVQRYQES

SEQ ID NO: 1798 - protein, 9 aa, synthetic construct
LFVYDLLFH

SEQ ID NO: 1799 - protein, 9 aa, synthetic construct
LGELGNSFG

SEQ ID NO: 1800 - protein, 9 aa, synthetic construct
LGERALRDL

SEQ ID NO: 1801 - protein, 9 aa, synthetic construct
LGMDCWQWE

SEQ ID NO: 1802 - protein, 9 aa, synthetic construct
LGNHFNNWM

SEQ ID NO: 1803 - protein, 9 aa, synthetic construct
LGNPCNLGD

SEQ ID NO: 1804 - protein, 9 aa, synthetic construct
LGSLCNCWF

SEQ ID NO: 1805 - protein, 9 aa, synthetic construct
LGSPFYECG

SEQ ID NO: 1806 - protein, 9 aa, synthetic construct
LGTLMSQHC

SEQ ID NO: 1807 - protein, 9 aa, synthetic construct
LHFQIDAED

SEQ ID NO: 1808 - protein, 9 aa, synthetic construct
LHHRVYQDA

SEQ ID NO: 1809 - protein, 9 aa, synthetic construct
LHPTFWQEK

SEQ ID NO: 1810 - protein, 9 aa, synthetic construct
LHQDIMMAG

SEQ ID NO: 1811 - protein, 9 aa, synthetic construct
LHQLHIMQA

SEQ ID NO: 1812 - protein, 9 aa, synthetic construct
LIALFMDYR

SEQ ID NO: 1813 - protein, 9 aa, synthetic construct
LIATWVNAN

SEQ ID NO: 1814 - protein, 9 aa, synthetic construct
LICLAQAWK

SEQ ID NO: 1815 - protein, 9 aa, synthetic construct
LIDERFVQG

SEQ ID NO: 1816 - protein, 9 aa, synthetic construct
LIKPFIDKA

SEQ ID NO: 1817 - protein, 9 aa, synthetic construct
LIMMSNWQD

SEQ ID NO: 1818 - protein, 9 aa, synthetic construct
LINHGQTSC

SEQ ID NO: 1819 - protein, 9 aa, synthetic construct
LINQFIACT

SEQ ID NO: 1820 - protein, 9 aa, synthetic construct
LINSTMVSG

SEQ ID NO: 1821 - protein, 9 aa, synthetic construct
LISLAAYIE

SEQ ID NO: 1822 - protein, 9 aa, synthetic construct
LISWKQTNS

SEQ ID NO: 1823 - protein, 9 aa, synthetic construct
LIYSNIKAQ

SEQ ID NO: 1824 - protein, 9 aa, synthetic construct
LKAPCQMDR

SEQ ID NO: 1825 - protein, 9 aa, synthetic construct
LKDELVMLG

SEQ ID NO: 1826 - protein, 9 aa, synthetic construct
LKGYKPSKF

SEQ ID NO: 1827 - protein, 9 aa, synthetic construct
LKNVIHDGC

SEQ ID NO: 1828 - protein, 9 aa, synthetic construct
LKSWFGQSP

SEQ ID NO: 1829 - protein, 9 aa, synthetic construct
LKVEKVMLG

SEQ ID NO: 1830 - protein, 9 aa, synthetic construct
LKWPVVNCD

SEQ ID NO: 1831 - protein, 9 aa, synthetic construct
LLGYAQCST

SEQ ID NO: 1832 - protein, 9 aa, synthetic construct
LLKDYMNST

SEQ ID NO: 1833 - protein, 9 aa, synthetic construct
LLKTCDIFR

SEQ ID NO: 1834 - protein, 9 aa, synthetic construct
LLMGFWMQD

SEQ ID NO: 1835 - protein, 9 aa, synthetic construct
LLNKYENMG

SEQ ID NO: 1836 - protein, 9 aa, synthetic construct
LLRFYGCCM

SEQ ID NO: 1837 - protein, 9 aa, synthetic construct
LMEAASRSY

SEQ ID NO: 1838 - protein, 9 aa, synthetic construct
LMLTYSDHY

SEQ ID NO: 1839 - protein, 9 aa, synthetic construct
LMNRGEAND

SEQ ID NO: 1840 - protein, 9 aa, synthetic construct
LMNYSGSSM

SEQ ID NO: 1841 - protein, 9 aa, synthetic construct
LMQTFPQKC

SEQ ID NO: 1842 - protein, 9 aa, synthetic construct
LMRQGVLFH

SEQ ID NO: 1843 - protein, 9 aa, synthetic construct
LMSSTSAHY

SEQ ID NO: 1844 - protein, 9 aa, synthetic construct
LMTGFMQMG

SEQ ID NO: 1845 - protein, 9 aa, synthetic construct
LMTPQVKQA

SEQ ID NO: 1846 - protein, 9 aa, synthetic construct
LMTTQVKQA

SEQ ID NO: 1847 - protein, 9 aa, synthetic construct
LMVAKTWDC

SEQ ID NO: 1848 - protein, 9 aa, synthetic construct
LMVFKQLAN

SEQ ID NO: 1849 - protein, 9 aa, synthetic construct
LMVHGLVYS

SEQ ID NO: 1850 - protein, 9 aa, synthetic construct
LMWMTPWDN

SEQ ID NO: 1851 - protein, 9 aa, synthetic construct
LMYMIGTGP

SEQ ID NO: 1852 - protein, 9 aa, synthetic construct
LMYMIITGP

SEQ ID NO: 1853 - protein, 9 aa, synthetic construct
LMYQKDCAQ

SEQ ID NO: 1854 - protein, 9 aa, synthetic construct
LNCHLTNST

SEQ ID NO: 1855 - protein, 9 aa, synthetic construct
LNESHPPTD

SEQ ID NO: 1856 - protein, 9 aa, synthetic construct
LNGHYTVQS

SEQ ID NO: 1857 - protein, 9 aa, synthetic construct
LNKCCSLFY

SEQ ID NO: 1858 - protein, 9 aa, synthetic construct
LNMDYNKCQ

SEQ ID NO: 1859 - protein, 9 aa, synthetic construct
LNNACLSDE

SEQ ID NO: 1860 - protein, 9 aa, synthetic construct
LNNAGYRPC

SEQ ID NO: 1861 - protein, 9 aa, synthetic construct
LNVMSIHCC

SEQ ID NO: 1862 - protein, 9 aa, synthetic construct
LPANGQLLA

SEQ ID NO: 1863 - protein, 9 aa, synthetic construct
LPHAMQKMY

SEQ ID NO: 1864 - protein, 9 aa, synthetic construct
LPHDKIKDM

SEQ ID NO: 1865 - protein, 9 aa, synthetic construct
LPHFWGHSE

SEQ ID NO: 1866 - protein, 9 aa, synthetic construct
LPHKMQNMY

SEQ ID NO: 1867 - protein, 9 aa, synthetic construct
LPVAMQISH

SEQ ID NO: 1868 - protein, 9 aa, synthetic construct
LPVDKIKDC

SEQ ID NO: 1869 - protein, 9 aa, synthetic construct
LQAFYFHDQ

SEQ ID NO: 1870 - protein, 9 aa, synthetic construct
LQARVGKVF

SEQ ID NO: 1871 - protein, 9 aa, synthetic construct
LQDRCVCCY

SEQ ID NO: 1872 - protein, 9 aa, synthetic construct
LQDTMMANE

SEQ ID NO: 1873 - protein, 9 aa, synthetic construct
LQHLKKYMV

SEQ ID NO: 1874 - protein, 9 aa, synthetic construct
LQITHNGWQ

SEQ ID NO: 1875 - protein, 9 aa, synthetic construct
LQMTHNGCQ

SEQ ID NO: 1876 - protein, 9 aa, synthetic construct
LQPWWLGMV

SEQ ID NO: 1877 - protein, 9 aa, synthetic construct
LQSTYKMFT

SEQ ID NO: 1878 - protein, 9 aa, synthetic construct
LQYSLGQQT

SEQ ID NO: 1879 - protein, 9 aa, synthetic construct
LRAVWAKMD

SEQ ID NO: 1880 - protein, 9 aa, synthetic construct
LRDKVDWYA

SEQ ID NO: 1881 - protein, 9 aa, synthetic construct
LRELYTGMF

SEQ ID NO: 1882 - protein, 9 aa, synthetic construct
LRIGVLSQF

SEQ ID NO: 1883 - protein, 9 aa, synthetic construct
LRIPFGAAL

SEQ ID NO: 1884 - protein, 9 aa, synthetic construct
LRMPFSNGV

SEQ ID NO: 1885 - protein, 9 aa, synthetic construct
LRRECSTCL

SEQ ID NO: 1886 - protein, 9 aa, synthetic construct
LRTLQIDSM

SEQ ID NO: 1887 - protein, 9 aa, synthetic construct
LRTPHNHGL

SEQ ID NO: 1888 - protein, 9 aa, synthetic construct
LRVDTNQQC

SEQ ID NO: 1889 - protein, 9 aa, synthetic construct
LRVTHDVCS

SEQ ID NO: 1890 - protein, 9 aa, synthetic construct
LRVTHNVCS

SEQ ID NO: 1891 - protein, 9 aa, synthetic construct
LSACTVQNM

SEQ ID NO: 1892 - protein, 9 aa, synthetic construct
LSAFVSHMK

SEQ ID NO: 1893 - protein, 9 aa, synthetic construct
LSAKEELSG

SEQ ID NO: 1894 - protein, 9 aa, synthetic construct
LSCKMTNPT

SEQ ID NO: 1895 - protein, 9 aa, synthetic construct
LSEESGYCS

SEQ ID NO: 1896 - protein, 9 aa, synthetic construct
LSFQMVDQQ

SEQ ID NO: 1897 - protein, 9 aa, synthetic construct
LSFYYCGPH

SEQ ID NO: 1898 - protein, 9 aa, synthetic construct
LSFYYPLHY

SEQ ID NO: 1899 - protein, 9 aa, synthetic construct
LSGHTYQDN

SEQ ID NO: 1900 - protein, 9 aa, synthetic construct
LSHETHMGN

SEQ ID NO: 1901 - protein, 9 aa, synthetic construct
LSIPYQGLN

SEQ ID NO: 1902 - protein, 9 aa, synthetic construct
LSKDCVAFR

SEQ ID NO: 1903 - protein, 9 aa, synthetic construct
LSKDCVTFR

SEQ ID NO: 1904 - protein, 9 aa, synthetic construct
LSLHYLHHH

SEQ ID NO: 1905 - protein, 9 aa, synthetic construct
LSLNQKWVH

SEQ ID NO: 1906 - protein, 9 aa, synthetic construct
LSNMVLAAD

SEQ ID NO: 1907 - protein, 9 aa, synthetic construct
LSPLLDCGN

SEQ ID NO: 1908 - protein, 9 aa, synthetic construct
LSPTFNHCE

SEQ ID NO: 1909 - protein, 9 aa, synthetic construct
LSQAMSPGC

SEQ ID NO: 1910 - protein, 9 aa, synthetic construct
LSQPINHQM

SEQ ID NO: 1911 - protein, 9 aa, synthetic construct
LSQPYGAGD

SEQ ID NO: 1912 - protein, 9 aa, synthetic construct
LSSIWYAAN

SEQ ID NO: 1913 - protein, 9 aa, synthetic construct
LSSYDAKYH

SEQ ID NO: 1914 - protein, 9 aa, synthetic construct
LSTMTQGSG

SEQ ID NO: 1915 - protein, 9 aa, synthetic construct
LSVHTCQEQ

SEQ ID NO: 1916 - protein, 9 aa, synthetic construct
LSVLAGLGG

SEQ ID NO: 1917 - protein, 9 aa, synthetic construct
LSVQFNNQS

SEQ ID NO: 1918 - protein, 9 aa, synthetic construct
LSWETKGCG

SEQ ID NO: 1919 - protein, 9 aa, synthetic construct
LSWHCGEEN

SEQ ID NO: 1920 - protein, 9 aa, synthetic construct
LTADPQERF

SEQ ID NO: 1921 - protein, 9 aa, synthetic construct
LTAVKQEGY

SEQ ID NO: 1922 - protein, 9 aa, synthetic construct
LTCNCNYWQ

SEQ ID NO: 1923 - protein, 9 aa, synthetic construct
LTCSKHLQP

SEQ ID NO: 1924 - protein, 9 aa, synthetic construct
LTEFIQAAQ

SEQ ID NO: 1925 - protein, 9 aa, synthetic construct
LTEKGMLDC

SEQ ID NO: 1926 - protein, 9 aa, synthetic construct
LTEKGMLDW

SEQ ID NO: 1927 - protein, 9 aa, synthetic construct
LTEWLYQEM

SEQ ID NO: 1928 - protein, 9 aa, synthetic construct
LTGWFNTRD

SEQ ID NO: 1929 - protein, 9 aa, synthetic construct
LTHILDEFC

SEQ ID NO: 1930 - protein, 9 aa, synthetic construct
LTISHNVSG

SEQ ID NO: 1931 - protein, 9 aa, synthetic construct
LTLGMSSHE

SEQ ID NO: 1932 - protein, 9 aa, synthetic construct
LTLGMSSHK

SEQ ID NO: 1933 - protein, 9 aa, synthetic construct
LTLPFKPEY

SEQ ID NO: 1934 - protein, 9 aa, synthetic construct
LTLTWGQTY

SEQ ID NO: 1935 - protein, 9 aa, synthetic construct
LTMCYESNN

SEQ ID NO: 1936 - protein, 9 aa, synthetic construct
LTMVGEYVN

SEQ ID NO: 1937 - protein, 9 aa, synthetic construct
LTRFLNCQR

SEQ ID NO: 1938 - protein, 9 aa, synthetic construct
LTRWNEEKE

SEQ ID NO: 1939 - protein, 9 aa, synthetic construct
LTSFVDCVQ

SEQ ID NO: 1940 - protein, 9 aa, synthetic construct
LTSRYNVTH

SEQ ID NO: 1941 - protein, 9 aa, synthetic construct
LTSSKEFEH

SEQ ID NO: 1942 - protein, 9 aa, synthetic construct
LTSYENWGW

SEQ ID NO: 1943 - protein, 9 aa, synthetic construct
LTTHFVEED

SEQ ID NO: 1944 - protein, 9 aa, synthetic construct
LTTMVKKAA

SEQ ID NO: 1945 - protein, 9 aa, synthetic construct
LTTSLNGFD

SEQ ID NO: 1946 - protein, 9 aa, synthetic construct
LTVGHYVYD

SEQ ID NO: 1947 - protein, 9 aa, synthetic construct
LTVPNESAF

SEQ ID NO: 1948 - protein, 9 aa, synthetic construct
LTVSKEFSH

SEQ ID NO: 1949 - protein, 9 aa, synthetic construct
LTVWQQKME

SEQ ID NO: 1950 - protein, 9 aa, synthetic construct
LTYLLGHKE

SEQ ID NO: 1951 - protein, 9 aa, synthetic construct
LVADMYERS

SEQ ID NO: 1952 - protein, 9 aa, synthetic construct
LVCMQGRSN

SEQ ID NO: 1953 - protein, 9 aa, synthetic construct
LVDQSGDGV

SEQ ID NO: 1954 - protein, 9 aa, synthetic construct
LVECSNLVA

SEQ ID NO: 1955 - protein, 9 aa, synthetic construct
LVGERKNAY

SEQ ID NO: 1956 - protein, 9 aa, synthetic construct
LVGWTLQHV

SEQ ID NO: 1957 - protein, 9 aa, synthetic construct
LVITKMLQP

SEQ ID NO: 1958 - protein, 9 aa, synthetic construct
LVKLATYTH

SEQ ID NO: 1959 - protein, 9 aa, synthetic construct
LVLPVEFYM

SEQ ID NO: 1960 - protein, 9 aa, synthetic construct
LVNLATYTH

SEQ ID NO: 1961 - protein, 9 aa, synthetic construct
LVTTEMGTN

SEQ ID NO: 1962 - protein, 9 aa, synthetic construct
LVTWAANEQ

SEQ ID NO: 1963 - protein, 9 aa, synthetic construct
LVVEDWIRC

SEQ ID NO: 1964 - protein, 9 aa, synthetic construct
LWAAVQIDH

SEQ ID NO: 1965 - protein, 9 aa, synthetic construct
LWCPKEIER

SEQ ID NO: 1966 - protein, 9 aa, synthetic construct
LWDTSMLKE

SEQ ID NO: 1967 - protein, 9 aa, synthetic construct
LWEGLATCL

SEQ ID NO: 1968 - protein, 9 aa, synthetic construct
LWEKCEFDQ

SEQ ID NO: 1969 - protein, 9 aa, synthetic construct
LWFAITKER

SEQ ID NO: 1970 - protein, 9 aa, synthetic construct
LWGSFGASS

SEQ ID NO: 1971 - protein, 9 aa, synthetic construct
LWGWTLQHQ

SEQ ID NO: 1972 - protein, 9 aa, synthetic construct
LWIKQHVKG

SEQ ID NO: 1973 - protein, 9 aa, synthetic construct
LWKGYLKSN

SEQ ID NO: 1974 - protein, 9 aa, synthetic construct
LWMNTGQYH

SEQ ID NO: 1975 - protein, 9 aa, synthetic construct
LWNIYGTME

SEQ ID NO: 1976 - protein, 9 aa, synthetic construct
LWNQQDWCR

SEQ ID NO: 1977 - protein, 9 aa, synthetic construct
LWNTRGIYN

SEQ ID NO: 1978 - protein, 9 aa, synthetic construct
LWQYSHAWQ

SEQ ID NO: 1979 - protein, 9 aa, synthetic construct
LWTPCNHLM

SEQ ID NO: 1980 - protein, 9 aa, synthetic construct
LWYQMLHGL

SEQ ID NO: 1981 - protein, 9 aa, synthetic construct
LYCVWPAGT

SEQ ID NO: 1982 - protein, 9 aa, synthetic construct
LYERYWVKQ

SEQ ID NO: 1983 - protein, 9 aa, synthetic construct
LYFFMGTQA

SEQ ID NO: 1984 - protein, 9 aa, synthetic construct
LYFGFPMSG

SEQ ID NO: 1985 - protein, 9 aa, synthetic construct
LYFNMVQGL

SEQ ID NO: 1986 - protein, 9 aa, synthetic construct
LYFRMGTVA

SEQ ID NO: 1987 - protein, 9 aa, synthetic construct
LYGWVDLEG

SEQ ID NO: 1988 - protein, 9 aa, synthetic construct
LYLQHQIDT

SEQ ID NO: 1989 - protein, 9 aa, synthetic construct
LYRKIMSIV

SEQ ID NO: 1990 - protein, 9 aa, synthetic construct
LYSYMLHDR

SEQ ID NO: 1991 - protein, 9 aa, synthetic construct
LYVMKGIQV

SEQ ID NO: 1992 - protein, 9 aa, synthetic construct
LYVQSHCAV

SEQ ID NO: 1993 - protein, 9 aa, synthetic construct
LYWFYLEIH

SEQ ID NO: 1994 - protein, 9 aa, synthetic construct
MAAEYESCS

SEQ ID NO: 1995 - protein, 9 aa, synthetic construct
MAFFKSNLH

SEQ ID NO: 1996 - protein, 9 aa, synthetic construct
MAGHYFNSR

SEQ ID NO: 1997 - protein, 9 aa, synthetic construct
MAGQWCCPE

SEQ ID NO: 1998 - protein, 9 aa, synthetic construct
MAHPDQQHY

SEQ ID NO: 1999 - protein, 9 aa, synthetic construct
MAIEMPLHW

SEQ ID NO: 2000 - protein, 9 aa, synthetic construct
MAKQEINWI

SEQ ID NO: 2001 - protein, 9 aa, synthetic construct
MALPVTSIR

SEQ ID NO: 2002 - protein, 9 aa, synthetic construct
MAMNQPEWS

SEQ ID NO: 2003 - protein, 9 aa, synthetic construct
MAMPIHDRI

SEQ ID NO: 2004 - protein, 9 aa, synthetic construct
MAQHAITTH

SEQ ID NO: 2005 - protein, 9 aa, synthetic construct
MAQKREVGV

SEQ ID NO: 2006 - protein, 9 aa, synthetic construct
MASPYTHVW

SEQ ID NO: 2007 - protein, 9 aa, synthetic construct
MATCYMYAD

SEQ ID NO: 2008 - protein, 9 aa, synthetic construct
MATHGNSKT

SEQ ID NO: 2009 - protein, 9 aa, synthetic construct
MATVNLRDC

SEQ ID NO: 2010 - protein, 9 aa, synthetic construct
MAVEFCQSD

SEQ ID NO: 2011 - protein, 9 aa, synthetic construct
MAYCNHFSD

SEQ ID NO: 2012 - protein, 9 aa, synthetic construct
MAYHSAQCI

SEQ ID NO: 2013 - protein, 9 aa, synthetic construct
MAYPTQLIF

SEQ ID NO: 2014 - protein, 9 aa, synthetic construct
MAYTPEFGN

SEQ ID NO: 2015 - protein, 9 aa, synthetic construct
MCDDPRAWQ

SEQ ID NO: 2016 - protein, 9 aa, synthetic construct
MCDEKFSYG

SEQ ID NO: 2017 - protein, 9 aa, synthetic construct
MCDEKNSMG

SEQ ID NO: 2018 - protein, 9 aa, synthetic construct
MCEPNQGMQ

SEQ ID NO: 2019 - protein, 9 aa, synthetic construct
MCGPSLVYA

SEQ ID NO: 2020 - protein, 9 aa, synthetic construct
MCHNYAGVD

SEQ ID NO: 2021 - protein, 9 aa, synthetic construct
MCHPYFSDG

SEQ ID NO: 2022 - protein, 9 aa, synthetic construct
MCLDSIMFG

SEQ ID NO: 2023 - protein, 9 aa, synthetic construct
MCNGFCGIW

SEQ ID NO: 2024 - protein, 9 aa, synthetic construct
MCNIHNIWD

SEQ ID NO: 2025 - protein, 9 aa, synthetic construct
MCNYWITDC

SEQ ID NO: 2026 - protein, 9 aa, synthetic construct
MCSVYQACM

SEQ ID NO: 2027 - protein, 9 aa, synthetic construct
MCTADQKSI

SEQ ID NO: 2028 - protein, 9 aa, synthetic construct
MDDICEFYA

SEQ ID NO: 2029 - protein, 9 aa, synthetic construct
MDHPCQQHY

SEQ ID NO: 2030 - protein, 9 aa, synthetic construct
MDNCPPMWN

SEQ ID NO: 2031 - protein, 9 aa, synthetic construct
MEDLWTVGP

SEQ ID NO: 2032 - protein, 9 aa, synthetic construct
MEFLIMADE

SEQ ID NO: 2033 - protein, 9 aa, synthetic construct
MENEANIRG

SEQ ID NO: 2034 - protein, 9 aa, synthetic construct
MESCKLWGV

SEQ ID NO: 2035 - protein, 9 aa, synthetic construct
MEVPDFMSY

SEQ ID NO: 2036 - protein, 9 aa, synthetic construct
MFDLYHDFK

SEQ ID NO: 2037 - protein, 9 aa, synthetic construct
MFEKRNHWG

SEQ ID NO: 2038 - protein, 9 aa, synthetic construct
MFEMQYCSP

SEQ ID NO: 2039 - protein, 9 aa, synthetic construct
MFERMYVVN

SEQ ID NO: 2040 - protein, 9 aa, synthetic construct
MFHAQIHCM

SEQ ID NO: 2041 - protein, 9 aa, synthetic construct
MFNMFTEWR

SEQ ID NO: 2042 - protein, 9 aa, synthetic construct
MFNMLTDSA

SEQ ID NO: 2043 - protein, 9 aa, synthetic construct
MFQFMECLA

SEQ ID NO: 2044 - protein, 9 aa, synthetic construct
MFTISGLHA

SEQ ID NO: 2045 - protein, 9 aa, synthetic construct
MGAEHMCVQ

SEQ ID NO: 2046 - protein, 9 aa, synthetic construct
MGARHMNQE

SEQ ID NO: 2047 - protein, 9 aa, synthetic construct
MGATKSDDF

SEQ ID NO: 2048 - protein, 9 aa, synthetic construct
MGDWLGAPT

SEQ ID NO: 2049 - protein, 9 aa, synthetic construct
MGEGLSFYA

SEQ ID NO: 2050 - protein, 9 aa, synthetic construct
MGGVANGSS

SEQ ID NO: 2051 - protein, 9 aa, synthetic construct
MGHWGAEMP

SEQ ID NO: 2052 - protein, 9 aa, synthetic construct
MGNHLCHYW

SEQ ID NO: 2053 - protein, 9 aa, synthetic construct
MGNICNVMF

SEQ ID NO: 2054 - protein, 9 aa, synthetic construct
MGPLLFLFD

SEQ ID NO: 2055 - protein, 9 aa, synthetic construct
MGSMRIQTD

SEQ ID NO: 2056 - protein, 9 aa, synthetic construct
MGSPAAAVG

SEQ ID NO: 2057 - protein, 9 aa, synthetic construct
MGSQQIQTD

SEQ ID NO: 2058 - protein, 9 aa, synthetic construct
MGTVEKICH

SEQ ID NO: 2059 - protein, 9 aa, synthetic construct
MGVQLPIVE

SEQ ID NO: 2060 - protein, 9 aa, synthetic construct
MGWHYGGWS

SEQ ID NO: 2061 - protein, 9 aa, synthetic construct
MHDSCYVMP

SEQ ID NO: 2062 - protein, 9 aa, synthetic construct
MHGPSLAYA

SEQ ID NO: 2063 - protein, 9 aa, synthetic construct
MHHSVVAQF

SEQ ID NO: 2064 - protein, 9 aa, synthetic construct
MHLEKNEMM

SEQ ID NO: 2065 - protein, 9 aa, synthetic construct
MHMEVLWGH

SEQ ID NO: 2066 - protein, 9 aa, synthetic construct
MHMLYKFNC

SEQ ID NO: 2067 - protein, 9 aa, synthetic construct
MHMSGQSWH

SEQ ID NO: 2068 - protein, 9 aa, synthetic construct
MHMSKQSWL

SEQ ID NO: 2069 - protein, 9 aa, synthetic construct
MHMTATIFG

SEQ ID NO: 2070 - protein, 9 aa, synthetic construct
MHMVKGGWT

SEQ ID NO: 2071 - protein, 9 aa, synthetic construct
MHMVPGGWM

SEQ ID NO: 2072 - protein, 9 aa, synthetic construct
MHNAHGIIE

SEQ ID NO: 2073 - protein, 9 aa, synthetic construct
MHNYYEMCS

SEQ ID NO: 2074 - protein, 9 aa, synthetic construct
MHQTLQCIG

SEQ ID NO: 2075 - protein, 9 aa, synthetic construct
MHSFYGLSG

SEQ ID NO: 2076 - protein, 9 aa, synthetic construct
MHTVYMESI

SEQ ID NO: 2077 - protein, 9 aa, synthetic construct
MHVNFNEQR

SEQ ID NO: 2078 - protein, 9 aa, synthetic construct
MHWFYNTGE

SEQ ID NO: 2079 - protein, 9 aa, synthetic construct
MIAINGGEQ

SEQ ID NO: 2080 - protein, 9 aa, synthetic construct
MIDLGVIDN

SEQ ID NO: 2081 - protein, 9 aa, synthetic construct
MIFHSTGAA

SEQ ID NO: 2082 - protein, 9 aa, synthetic construct
MIHHRDHSI

SEQ ID NO: 2083 - protein, 9 aa, synthetic construct
MIHPLQSHY

SEQ ID NO: 2084 - protein, 9 aa, synthetic construct
MIHQMQTLD

SEQ ID NO: 2085 - protein, 9 aa, synthetic construct
MILLHNQGT

SEQ ID NO: 2086 - protein, 9 aa, synthetic construct
MIMGYNFEF

SEQ ID NO: 2087 - protein, 9 aa, synthetic construct
MIMQGVMQA

SEQ ID NO: 2088 - protein, 9 aa, synthetic construct
MIMQGVVQA

SEQ ID NO: 2089 - protein, 9 aa, synthetic construct
MINCTAELA

SEQ ID NO: 2090 - protein, 9 aa, synthetic construct
MINCTAEVA

SEQ ID NO: 2091 - protein, 9 aa, synthetic construct
MINFNSGTC

SEQ ID NO: 2092 - protein, 9 aa, synthetic construct
MINFPSMIN

SEQ ID NO: 2093 - protein, 9 aa, synthetic construct
MINWKAPRA

SEQ ID NO: 2094 - protein, 9 aa, synthetic construct
MINWKAQCA

SEQ ID NO: 2095 - protein, 9 aa, synthetic construct
MIQQMMFYT

SEQ ID NO: 2096 - protein, 9 aa, synthetic construct
MIRGQDNWL

SEQ ID NO: 2097 - protein, 9 aa, synthetic construct
MIRIMTGQY

SEQ ID NO: 2098 - protein, 9 aa, synthetic construct
MISAPPDTC

SEQ ID NO: 2099 - protein, 9 aa, synthetic construct
MITMFDGMC

SEQ ID NO: 2100 - protein, 9 aa, synthetic construct
MITMYDGMC

SEQ ID NO: 2101 - protein, 9 aa, synthetic construct
MIYSRGNQP

SEQ ID NO: 2102 - protein, 9 aa, synthetic construct
MKDIKQVDC

SEQ ID NO: 2103 - protein, 9 aa, synthetic construct
MKFPNHAEW

SEQ ID NO: 2104 - protein, 9 aa, synthetic construct
MKGEMEQNA

SEQ ID NO: 2105 - protein, 9 aa, synthetic construct
MKHPMVNNE

SEQ ID NO: 2106 - protein, 9 aa, synthetic construct
MKMNYGLVC

SEQ ID NO: 2107 - protein, 9 aa, synthetic construct
MKSEQQILA

SEQ ID NO: 2108 - protein, 9 aa, synthetic construct
MKTTMVMAP

SEQ ID NO: 2109 - protein, 9 aa, synthetic construct
MKWFVFDSN

SEQ ID NO: 2110 - protein, 9 aa, synthetic construct
MLCKCNADT

SEQ ID NO: 2111 - protein, 9 aa, synthetic construct
MLLLIPFAP

SEQ ID NO: 2112 - protein, 9 aa, synthetic construct
MLSTYMPIS

SEQ ID NO: 2113 - protein, 9 aa, synthetic construct
MLYVNMGDR

SEQ ID NO: 2114 - protein, 9 aa, synthetic construct
MMAVIRQQS

SEQ ID NO: 2115 - protein, 9 aa, synthetic construct
MMEQSNWHY

SEQ ID NO: 2116 - protein, 9 aa, synthetic construct
MMGFKDISC

SEQ ID NO: 2117 - protein, 9 aa, synthetic construct
MMHWIDMCT

SEQ ID NO: 2118 - protein, 9 aa, synthetic construct
MMIPWIGIA

SEQ ID NO: 2119 - protein, 9 aa, synthetic construct
MMLKQGPIY

SEQ ID NO: 2120 - protein, 9 aa, synthetic construct
MMNPNTEPH

SEQ ID NO: 2121 - protein, 9 aa, synthetic construct
MMNTWGFMP

SEQ ID NO: 2122 - protein, 9 aa, synthetic construct
MMNYNDHLH

SEQ ID NO: 2123 - protein, 9 aa, synthetic construct
MMPGETVRG

SEQ ID NO: 2124 - protein, 9 aa, synthetic construct
MMQTIQADV

SEQ ID NO: 2125 - protein, 9 aa, synthetic construct
MMSSNVLAE

SEQ ID NO: 2126 - protein, 9 aa, synthetic construct
MMVKRDLND

SEQ ID NO: 2127 - protein, 9 aa, synthetic construct
MMYISCSCT

SEQ ID NO: 2128 - protein, 9 aa, synthetic construct
MNADVCLTG

SEQ ID NO: 2129 - protein, 9 aa, synthetic construct
MNEMAQHDR

SEQ ID NO: 2130 - protein, 9 aa, synthetic construct
MNEQYRHGV

SEQ ID NO: 2131 - protein, 9 aa, synthetic construct
MNEYKGENY

SEQ ID NO: 2132 - protein, 9 aa, synthetic construct
MNEYKHGNY

SEQ ID NO: 2133 - protein, 9 aa, synthetic construct
MNGFTMTYH

SEQ ID NO: 2134 - protein, 9 aa, synthetic construct
MNGRPEQMA

SEQ ID NO: 2135 - protein, 9 aa, synthetic construct
MNGRPNQML

SEQ ID NO: 2136 - protein, 9 aa, synthetic construct
MNINDETQC

SEQ ID NO: 2137 - protein, 9 aa, synthetic construct
MNMMLMSNS

SEQ ID NO: 2138 - protein, 9 aa, synthetic construct
MNMTMQYIT

SEQ ID NO: 2139 - protein, 9 aa, synthetic construct
MNPLGPLLW

SEQ ID NO: 2140 - protein, 9 aa, synthetic construct
MNRFTHNDQ

SEQ ID NO: 2141 - protein, 9 aa, synthetic construct
MNSMKPNSV

SEQ ID NO: 2142 - protein, 9 aa, synthetic construct
MNSWRNTSD

SEQ ID NO: 2143 - protein, 9 aa, synthetic construct
MPHGWCNTI

SEQ ID NO: 2144 - protein, 9 aa, synthetic construct
MPHHTSDPF

SEQ ID NO: 2145 - protein, 9 aa, synthetic construct
MPNQYHSMD

SEQ ID NO: 2146 - protein, 9 aa, synthetic construct
MQDFMFCIT

SEQ ID NO: 2147 - protein, 9 aa, synthetic construct
MQDYWTLGA

SEQ ID NO: 2148 - protein, 9 aa, synthetic construct
MQEKIHMCT

SEQ ID NO: 2149 - protein, 9 aa, synthetic construct
MQELITFDE

SEQ ID NO: 2150 - protein, 9 aa, synthetic construct
MQELITFGE

SEQ ID NO: 2151 - protein, 9 aa, synthetic construct
MQHQNQSVC

SEQ ID NO: 2152 - protein, 9 aa, synthetic construct
MQKTLCGSY

SEQ ID NO: 2153 - protein, 9 aa, synthetic construct
MQNYLQHCE

SEQ ID NO: 2154 - protein, 9 aa, synthetic construct
MQSLYETFG

SEQ ID NO: 2155 - protein, 9 aa, synthetic construct
MQVMYEASE

SEQ ID NO: 2156 - protein, 9 aa, synthetic construct
MRDLGVIWN

SEQ ID NO: 2157 - protein, 9 aa, synthetic construct
MRELMGAYC

SEQ ID NO: 2158 - protein, 9 aa, synthetic construct
MRIPSGVGQ

SEQ ID NO: 2159 - protein, 9 aa, synthetic construct
MRNTFNYLC

SEQ ID NO: 2160 - protein, 9 aa, synthetic construct
MSAARVYDL

SEQ ID NO: 2161 - protein, 9 aa, synthetic construct
MSAECLHSD

SEQ ID NO: 2162 - protein, 9 aa, synthetic construct
MSAIHDWGQ

SEQ ID NO: 2163 - protein, 9 aa, synthetic construct
MSAIPTNGM

SEQ ID NO: 2164 - protein, 9 aa, synthetic construct
MSAQVDCQF

SEQ ID NO: 2165 - protein, 9 aa, synthetic construct
MSATLEAAF

SEQ ID NO: 2166 - protein, 9 aa, synthetic construct
MSDDSTFDF

SEQ ID NO: 2167 - protein, 9 aa, synthetic construct
MSDDSTVDS

SEQ ID NO: 2168 - protein, 9 aa, synthetic construct
MSDLVPKWA

SEQ ID NO: 2169 - protein, 9 aa, synthetic construct
MSDPCVDNH

SEQ ID NO: 2170 - protein, 9 aa, synthetic construct
MSDPCVDNQ

SEQ ID NO: 2171 - protein, 9 aa, synthetic construct
MSDQKEHMS

SEQ ID NO: 2172 - protein, 9 aa, synthetic construct
MSDTCVANQ

SEQ ID NO: 2173 - protein, 9 aa, synthetic construct
MSEPFNYCG

SEQ ID NO: 2174 - protein, 9 aa, synthetic construct
MSERCYAGG

SEQ ID NO: 2175 - protein, 9 aa, synthetic construct
MSEVCPNDI

SEQ ID NO: 2176 - protein, 9 aa, synthetic construct
MSEVCSNDI

SEQ ID NO: 2177 - protein, 9 aa, synthetic construct
MSFQKPKWS

SEQ ID NO: 2178 - protein, 9 aa, synthetic construct
MSGMGDDFP

SEQ ID NO: 2179 - protein, 9 aa, synthetic construct
MSHEYLFYG

SEQ ID NO: 2180 - protein, 9 aa, synthetic construct
MSINMPLHW

SEQ ID NO: 2181 - protein, 9 aa, synthetic construct
MSIPSFMQK

SEQ ID NO: 2182 - protein, 9 aa, synthetic construct
MSLLIPLAP

SEQ ID NO: 2183 - protein, 9 aa, synthetic construct
MSNNSVGSY

SEQ ID NO: 2184 - protein, 9 aa, synthetic construct
MSQFKAYLF

SEQ ID NO: 2185 - protein, 9 aa, synthetic construct
MSQLVHRCE

SEQ ID NO: 2186 - protein, 9 aa, synthetic construct
MSQSTYHAG

SEQ ID NO: 2187 - protein, 9 aa, synthetic construct
MSRHDLNWD

SEQ ID NO: 2188 - protein, 9 aa, synthetic construct
MSVHFIYMY

SEQ ID NO: 2189 - protein, 9 aa, synthetic construct
MSVHTWDHY

SEQ ID NO: 2190 - protein, 9 aa, synthetic construct
MTAILQDNW

SEQ ID NO: 2191 - protein, 9 aa, synthetic construct
MTAQIGHPI

SEQ ID NO: 2192 - protein, 9 aa, synthetic construct
MTDPYAGAK

SEQ ID NO: 2193 - protein, 9 aa, synthetic construct
MTDVHKHLG

SEQ ID NO: 2194 - protein, 9 aa, synthetic construct
MTELKTFGE

SEQ ID NO: 2195 - protein, 9 aa, synthetic construct
MTGEMIQNA

SEQ ID NO: 2196 - protein, 9 aa, synthetic construct
MTGQASDLI

SEQ ID NO: 2197 - protein, 9 aa, synthetic construct
MTGYGQHDA

SEQ ID NO: 2198 - protein, 9 aa, synthetic construct
MTITHHVNY

SEQ ID NO: 2199 - protein, 9 aa, synthetic construct
MTKHNMIVP

SEQ ID NO: 2200 - protein, 9 aa, synthetic construct
MTLPWGQQY

SEQ ID NO: 2201 - protein, 9 aa, synthetic construct
MTLTNMAYL

SEQ ID NO: 2202 - protein, 9 aa, synthetic construct
MTMDENTCR

SEQ ID NO: 2203 - protein, 9 aa, synthetic construct
MTMPVMINQ

SEQ ID NO: 2204 - protein, 9 aa, synthetic construct
MTMTATTFG

SEQ ID NO: 2205 - protein, 9 aa, synthetic construct
MTQRVVHWG

SEQ ID NO: 2206 - protein, 9 aa, synthetic construct
MTQYLQDSV

SEQ ID NO: 2207 - protein, 9 aa, synthetic construct
MTQYNKKVN

SEQ ID NO: 2208 - protein, 9 aa, synthetic construct
MTRCEGLFT

SEQ ID NO: 2209 - protein, 9 aa, synthetic construct
MTSHVQHRF

SEQ ID NO: 2210 - protein, 9 aa, synthetic construct
MTVLICDYE

SEQ ID NO: 2211 - protein, 9 aa, synthetic construct
MVALVDGHR

SEQ ID NO: 2212 - protein, 9 aa, synthetic construct
MVAVYNRQR

SEQ ID NO: 2213 - protein, 9 aa, synthetic construct
MVCPSNCAN

SEQ ID NO: 2214 - protein, 9 aa, synthetic construct
MVCTSLRFK

SEQ ID NO: 2215 - protein, 9 aa, synthetic construct
MVDFGNMQP

SEQ ID NO: 2216 - protein, 9 aa, synthetic construct
MVEYCYTQE

SEQ ID NO: 2217 - protein, 9 aa, synthetic construct
MVILSVETE

SEQ ID NO: 2218 - protein, 9 aa, synthetic construct
MVKQGGDWR

SEQ ID NO: 2219 - protein, 9 aa, synthetic construct
MVLKICTAK

SEQ ID NO: 2220 - protein, 9 aa, synthetic construct
MVMPVNIVD

SEQ ID NO: 2221 - protein, 9 aa, synthetic construct
MVMQDNASM

SEQ ID NO: 2222 - protein, 9 aa, synthetic construct
MVMSKQADL

SEQ ID NO: 2223 - protein, 9 aa, synthetic construct
MVNHHYMTG

SEQ ID NO: 2224 - protein, 9 aa, synthetic construct
MVQMDVHWE

SEQ ID NO: 2225 - protein, 9 aa, synthetic construct
MVSLITSRT

SEQ ID NO: 2226 - protein, 9 aa, synthetic construct
MVTEAHDYY

SEQ ID NO: 2227 - protein, 9 aa, synthetic construct
MVVQSPIVE

SEQ ID NO: 2228 - protein, 9 aa, synthetic construct
MWDVAHQSC

SEQ ID NO: 2229 - protein, 9 aa, synthetic construct
MWISRDQDH

SEQ ID NO: 2230 - protein, 9 aa, synthetic construct
MWNPMYIWN

SEQ ID NO: 2231 - protein, 9 aa, synthetic construct
MWREFTMQQ

SEQ ID NO: 2232 - protein, 9 aa, synthetic construct
MWTEFNEYV

SEQ ID NO: 2233 - protein, 9 aa, synthetic construct
MWWRESAMR

SEQ ID NO: 2234 - protein, 9 aa, synthetic construct
MYADFQSSY

SEQ ID NO: 2235 - protein, 9 aa, synthetic construct
MYCMKPNRQ

SEQ ID NO: 2236 - protein, 9 aa, synthetic construct
MYDSTHAVQ

SEQ ID NO: 2237 - protein, 9 aa, synthetic construct
MYDSVHAVQ

SEQ ID NO: 2238 - protein, 9 aa, synthetic construct
MYGQQSLWN

SEQ ID NO: 2239 - protein, 9 aa, synthetic construct
MYHEANSGF

SEQ ID NO: 2240 - protein, 9 aa, synthetic construct
MYHSKMTEA

SEQ ID NO: 2241 - protein, 9 aa, synthetic construct
MYHSYQNSD

SEQ ID NO: 2242 - protein, 9 aa, synthetic construct
MYKLLNDFS

SEQ ID NO: 2243 - protein, 9 aa, synthetic construct
MYKQMGMAD

SEQ ID NO: 2244 - protein, 9 aa, synthetic construct
MYLRDHNGL

SEQ ID NO: 2245 - protein, 9 aa, synthetic construct
MYRERRAGY

SEQ ID NO: 2246 - protein, 9 aa, synthetic construct
MYVSYMTHC

SEQ ID NO: 2247 - protein, 9 aa, synthetic construct
MYYHCITAQ

SEQ ID NO: 2248 - protein, 9 aa, synthetic construct
NAAMQDINH

SEQ ID NO: 2249 - protein, 9 aa, synthetic construct
NACFFQNDP

SEQ ID NO: 2250 - protein, 9 aa, synthetic construct
NACMIERAK

SEQ ID NO: 2251 - protein, 9 aa, synthetic construct
NACMIEWAK

SEQ ID NO: 2252 - protein, 9 aa, synthetic construct
NACNAYGRG

SEQ ID NO: 2253 - protein, 9 aa, synthetic construct
NACQNDLYW

SEQ ID NO: 2254 - protein, 9 aa, synthetic construct
NADHRFDAV

SEQ ID NO: 2255 - protein, 9 aa, synthetic construct
NADKIGMLD

SEQ ID NO: 2256 - protein, 9 aa, synthetic construct
NADMLMNGS

SEQ ID NO: 2257 - protein, 9 aa, synthetic construct
NADPQQYQE

SEQ ID NO: 2258 - protein, 9 aa, synthetic construct
NAEANWEYQ

SEQ ID NO: 2259 - protein, 9 aa, synthetic construct
NAELQQADI

SEQ ID NO: 2260 - protein, 9 aa, synthetic construct
NAENYQRLY

SEQ ID NO: 2261 - protein, 9 aa, synthetic construct
NAERYQKLY

SEQ ID NO: 2262 - protein, 9 aa, synthetic construct
NAESEDMLE

SEQ ID NO: 2263 - protein, 9 aa, synthetic construct
NAESRFAQM

SEQ ID NO: 2264 - protein, 9 aa, synthetic construct
NAFSEYVYD

SEQ ID NO: 2265 - protein, 9 aa, synthetic construct
NAGSHAIQS

SEQ ID NO: 2266 - protein, 9 aa, synthetic construct
NALPCAFNE

SEQ ID NO: 2267 - protein, 9 aa, synthetic construct
NAMLFHHAM

SEQ ID NO: 2268 - protein, 9 aa, synthetic construct
NAMYSHFLY

SEQ ID NO: 2269 - protein, 9 aa, synthetic construct
NANSHAIHS

SEQ ID NO: 2270 - protein, 9 aa, synthetic construct
NANWLHTQI

SEQ ID NO: 2271 - protein, 9 aa, synthetic construct
NAPPCAFNE

SEQ ID NO: 2272 - protein, 9 aa, synthetic construct
NASLERKWN

SEQ ID NO: 2273 - protein, 9 aa, synthetic construct
NASQYQLSA

SEQ ID NO: 2274 - protein, 9 aa, synthetic construct
NATDMGISF

SEQ ID NO: 2275 - protein, 9 aa, synthetic construct
NATTIHMWF

SEQ ID NO: 2276 - protein, 9 aa, synthetic construct
NAVFVQNLR

SEQ ID NO: 2277 - protein, 9 aa, synthetic construct
NAVLQQYQE

SEQ ID NO: 2278 - protein, 9 aa, synthetic construct
NAYSPESDG

SEQ ID NO: 2279 - protein, 9 aa, synthetic construct
NCAERMKFC

SEQ ID NO: 2280 - protein, 9 aa, synthetic construct
NCAEYFDHC

SEQ ID NO: 2281 - protein, 9 aa, synthetic construct
NCAIQLDQQ

SEQ ID NO: 2282 - protein, 9 aa, synthetic construct
NCEPIPFFP

SEQ ID NO: 2283 - protein, 9 aa, synthetic construct
NCIINHGRD

SEQ ID NO: 2284 - protein, 9 aa, synthetic construct
NCLEVVRAC

SEQ ID NO: 2285 - protein, 9 aa, synthetic construct
NCLPMPSLH

SEQ ID NO: 2286 - protein, 9 aa, synthetic construct
NCLQIGMQF

SEQ ID NO: 2287 - protein, 9 aa, synthetic construct
NCNIKEAMD

SEQ ID NO: 2288 - protein, 9 aa, synthetic construct
NCPREVATT

SEQ ID NO: 2289 - protein, 9 aa, synthetic construct
NCQNTTHYA

SEQ ID NO: 2290 - protein, 9 aa, synthetic construct
NCQPFMDYH

SEQ ID NO: 2291 - protein, 9 aa, synthetic construct
NCQPIMDTH

SEQ ID NO: 2292 - protein, 9 aa, synthetic construct
NCQRVNWTE

SEQ ID NO: 2293 - protein, 9 aa, synthetic construct
NCTLFQDSH

SEQ ID NO: 2294 - protein, 9 aa, synthetic construct
NCVQSFAVD

SEQ ID NO: 2295 - protein, 9 aa, synthetic construct
NCVSRKKFA

SEQ ID NO: 2296 - protein, 9 aa, synthetic construct
NDFMGAPEP

SEQ ID NO: 2297 - protein, 9 aa, synthetic construct
NDVIYIYQG

SEQ ID NO: 2298 - protein, 9 aa, synthetic construct
NEAHLWGHV

SEQ ID NO: 2299 - protein, 9 aa, synthetic construct
NEAILFAYH

SEQ ID NO: 2300 - protein, 9 aa, synthetic construct
NEAPYSTWQ

SEQ ID NO: 2301 - protein, 9 aa, synthetic construct
NESNPQNGW

SEQ ID NO: 2302 - protein, 9 aa, synthetic construct
NFAQFTKFQ

SEQ ID NO: 2303 - protein, 9 aa, synthetic construct
NFCKQGNTC

SEQ ID NO: 2304 - protein, 9 aa, synthetic construct
NFDQIGGCR

SEQ ID NO: 2305 - protein, 9 aa, synthetic construct
NFDQMKCAQ

SEQ ID NO: 2306 - protein, 9 aa, synthetic construct
NFEQINPLG

SEQ ID NO: 2307 - protein, 9 aa, synthetic construct
NFLSSCSSA

SEQ ID NO: 2308 - protein, 9 aa, synthetic construct
NFNQSSSTM

SEQ ID NO: 2309 - protein, 9 aa, synthetic construct
NFRHTDQCG

SEQ ID NO: 2310 - protein, 9 aa, synthetic construct
NFTFQCGIH

SEQ ID NO: 2311 - protein, 9 aa, synthetic construct
NFVHIQSGE

SEQ ID NO: 2312 - protein, 9 aa, synthetic construct
NFVTSGQMG

SEQ ID NO: 2313 - protein, 9 aa, synthetic construct
NFYMIQSSN

SEQ ID NO: 2314 - protein, 9 aa, synthetic construct
NFYMSGQAS

SEQ ID NO: 2315 - protein, 9 aa, synthetic construct
NGEQWHKGG

SEQ ID NO: 2316 - protein, 9 aa, synthetic construct
NGGSYIPCM

SEQ ID NO: 2317 - protein, 9 aa, synthetic construct
NGILMHTTF

SEQ ID NO: 2318 - protein, 9 aa, synthetic construct
NGPSYISWV

SEQ ID NO: 2319 - protein, 9 aa, synthetic construct
NGQHFDMVG

SEQ ID NO: 2320 - protein, 9 aa, synthetic construct
NGTGVVECG

SEQ ID NO: 2321 - protein, 9 aa, synthetic construct
NHAPLLAFW

SEQ ID NO: 2322 - protein, 9 aa, synthetic construct
NHASTGAGT

SEQ ID NO: 2323 - protein, 9 aa, synthetic construct
NHCPVQKAT

SEQ ID NO: 2324 - protein, 9 aa, synthetic construct
NHCSMCCGN

SEQ ID NO: 2325 - protein, 9 aa, synthetic construct
NHDEKLWAP

SEQ ID NO: 2326 - protein, 9 aa, synthetic construct
NHDYVKQTS

SEQ ID NO: 2327 - protein, 9 aa, synthetic construct
NHDYYCQTS

SEQ ID NO: 2328 - protein, 9 aa, synthetic construct
NHELYAQVA

SEQ ID NO: 2329 - protein, 9 aa, synthetic construct
NHGQLKFPV

SEQ ID NO: 2330 - protein, 9 aa, synthetic construct
NHGSREIDI

SEQ ID NO: 2331 - protein, 9 aa, synthetic construct
NHILKMEFW

SEQ ID NO: 2332 - protein, 9 aa, synthetic construct
NHNCVEMHG

SEQ ID NO: 2333 - protein, 9 aa, synthetic construct
NHPYDIGQY

SEQ ID NO: 2334 - protein, 9 aa, synthetic construct
NHRVNYEMY

SEQ ID NO: 2335 - protein, 9 aa, synthetic construct
NHSWVEMFG

SEQ ID NO: 2336 - protein, 9 aa, synthetic construct
NHVAYYMAK

SEQ ID NO: 2337 - protein, 9 aa, synthetic construct
NHYPLMVEW

SEQ ID NO: 2338 - protein, 9 aa, synthetic construct
NIAANWMFD

SEQ ID NO: 2339 - protein, 9 aa, synthetic construct
NIAGYWMFD

SEQ ID NO: 2340 - protein, 9 aa, synthetic construct
NICNLNQVE

SEQ ID NO: 2341 - protein, 9 aa, synthetic construct
NICTWNEAC

SEQ ID NO: 2342 - protein, 9 aa, synthetic construct
NICVKNKLH

SEQ ID NO: 2343 - protein, 9 aa, synthetic construct
NIELKTYFF

SEQ ID NO: 2344 - protein, 9 aa, synthetic construct
NIERKTYAF

SEQ ID NO: 2345 - protein, 9 aa, synthetic construct
NIFDWQFYA

SEQ ID NO: 2346 - protein, 9 aa, synthetic construct
NIHCKLHWY

SEQ ID NO: 2347 - protein, 9 aa, synthetic construct
NIICFNWQV

SEQ ID NO: 2348 - protein, 9 aa, synthetic construct
NIIHLMDYA

SEQ ID NO: 2349 - protein, 9 aa, synthetic construct
NIIQLMDYA

SEQ ID NO: 2350 - protein, 9 aa, synthetic construct
NINCIQIGK

SEQ ID NO: 2351 - protein, 9 aa, synthetic construct
NINHYNEGE

SEQ ID NO: 2352 - protein, 9 aa, synthetic construct
NIRCGNDAS

SEQ ID NO: 2353 - protein, 9 aa, synthetic construct
NISEPSQDY

SEQ ID NO: 2354 - protein, 9 aa, synthetic construct
NISFGTPPN

SEQ ID NO: 2355 - protein, 9 aa, synthetic construct
NISFGTPSN

SEQ ID NO: 2356 - protein, 9 aa, synthetic construct
NITQMYKHI

SEQ ID NO: 2357 - protein, 9 aa, synthetic construct
NIVSQTHQE

SEQ ID NO: 2358 - protein, 9 aa, synthetic construct
NIYHESHCG

SEQ ID NO: 2359 - protein, 9 aa, synthetic construct
NKFNGMHCG

SEQ ID NO: 2360 - protein, 9 aa, synthetic construct
NKFWSIDTS

SEQ ID NO: 2361 - protein, 9 aa, synthetic construct
NKNTHAAVW

SEQ ID NO: 2362 - protein, 9 aa, synthetic construct
NLFLTNGMG

SEQ ID NO: 2363 - protein, 9 aa, synthetic construct
NLFLWLMMD

SEQ ID NO: 2364 - protein, 9 aa, synthetic construct
NLHPRCHWI

SEQ ID NO: 2365 - protein, 9 aa, synthetic construct
NLKCIMIQC

SEQ ID NO: 2366 - protein, 9 aa, synthetic construct
NLVPFQTCE

SEQ ID NO: 2367 - protein, 9 aa, synthetic construct
NMMDLLTHC

SEQ ID NO: 2368 - protein, 9 aa, synthetic construct
NMMDLRTHC

SEQ ID NO: 2369 - protein, 9 aa, synthetic construct
NMMPRVCWQ

SEQ ID NO: 2370 - protein, 9 aa, synthetic construct
NMNTFGKMN

SEQ ID NO: 2371 - protein, 9 aa, synthetic construct
NMTMAHQAS

SEQ ID NO: 2372 - protein, 9 aa, synthetic construct
NMYHVQRFS

SEQ ID NO: 2373 - protein, 9 aa, synthetic construct
NNAIMWASP

SEQ ID NO: 2374 - protein, 9 aa, synthetic construct
NNGPGNIGM

SEQ ID NO: 2375 - protein, 9 aa, synthetic construct
NNGVHIFCE

SEQ ID NO: 2376 - protein, 9 aa, synthetic construct
NNLPLLTSV

SEQ ID NO: 2377 - protein, 9 aa, synthetic construct
NPDTMSHTA

SEQ ID NO: 2378 - protein, 9 aa, synthetic construct
NPEMDLRCA

SEQ ID NO: 2379 - protein, 9 aa, synthetic construct
NPEMDLWCA

SEQ ID NO: 2380 - protein, 9 aa, synthetic construct
NPIPGYFDQ

SEQ ID NO: 2381 - protein, 9 aa, synthetic construct
NPIVMNCLS

SEQ ID NO: 2382 - protein, 9 aa, synthetic construct
NPQPWLGMW

SEQ ID NO: 2383 - protein, 9 aa, synthetic construct
NPTVLMAHL

SEQ ID NO: 2384 - protein, 9 aa, synthetic construct
NQEEGHCLY

SEQ ID NO: 2385 - protein, 9 aa, synthetic construct
NQGPQMHGF

SEQ ID NO: 2386 - protein, 9 aa, synthetic construct
NQHVIYDVT

SEQ ID NO: 2387 - protein, 9 aa, synthetic construct
NQKAMCWMY

SEQ ID NO: 2388 - protein, 9 aa, synthetic construct
NQNFLGNWG

SEQ ID NO: 2389 - protein, 9 aa, synthetic construct
NQVLLDDGM

SEQ ID NO: 2390 - protein, 9 aa, synthetic construct
NRCDFSLFE

SEQ ID NO: 2391 - protein, 9 aa, synthetic construct
NRCFTTIEP

SEQ ID NO: 2392 - protein, 9 aa, synthetic construct
NRCFTTTEP

SEQ ID NO: 2393 - protein, 9 aa, synthetic construct
NREFQMIHC

SEQ ID NO: 2394 - protein, 9 aa, synthetic construct
NREMIYAAF

SEQ ID NO: 2395 - protein, 9 aa, synthetic construct
NRLVVNGPH

SEQ ID NO: 2396 - protein, 9 aa, synthetic construct
NRVAKIWRW

SEQ ID NO: 2397 - protein, 9 aa, synthetic construct
NSAKKEQGV

SEQ ID NO: 2398 - protein, 9 aa, synthetic construct
NSCTDNSSS

SEQ ID NO: 2399 - protein, 9 aa, synthetic construct
NSEHEGMWD

SEQ ID NO: 2400 - protein, 9 aa, synthetic construct
NSEQKQHLQ

SEQ ID NO: 2401 - protein, 9 aa, synthetic construct
NSFAFDMTE

SEQ ID NO: 2402 - protein, 9 aa, synthetic construct
NSGIPNNLA

SEQ ID NO: 2403 - protein, 9 aa, synthetic construct
NSGYECHAL

SEQ ID NO: 2404 - protein, 9 aa, synthetic construct
NSGYEWHAL

SEQ ID NO: 2405 - protein, 9 aa, synthetic construct
NSIPYQFAV

SEQ ID NO: 2406 - protein, 9 aa, synthetic construct
NSNSQARVY

SEQ ID NO: 2407 - protein, 9 aa, synthetic construct
NSQWVQMFG

SEQ ID NO: 2408 - protein, 9 aa, synthetic construct
NSTYATWAC

SEQ ID NO: 2409 - protein, 9 aa, synthetic construct
NSYQIGGTR

SEQ ID NO: 2410 - protein, 9 aa, synthetic construct
NTDHKMWDS

SEQ ID NO: 2411 - protein, 9 aa, synthetic construct
NTEHSPATN

SEQ ID NO: 2412 - protein, 9 aa, synthetic construct
NTGLENNIP

SEQ ID NO: 2413 - protein, 9 aa, synthetic construct
NTGYYNQQC

SEQ ID NO: 2414 - protein, 9 aa, synthetic construct
NTHHVTQWH

SEQ ID NO: 2415 - protein, 9 aa, synthetic construct
NTHQMAVVY

SEQ ID NO: 2416 - protein, 9 aa, synthetic construct
NTIHRESPA

SEQ ID NO: 2417 - protein, 9 aa, synthetic construct
NTMLKEMGP

SEQ ID NO: 2418 - protein, 9 aa, synthetic construct
NTMPLQPME

SEQ ID NO: 2419 - protein, 9 aa, synthetic construct
NTMYWWPRE

SEQ ID NO: 2420 - protein, 9 aa, synthetic construct
NTNFYQQMS

SEQ ID NO: 2421 - protein, 9 aa, synthetic construct
NTQLHDNFG

SEQ ID NO: 2422 - protein, 9 aa, synthetic construct
NTSHGCTYY

SEQ ID NO: 2423 - protein, 9 aa, synthetic construct
NTSMLNNGS

SEQ ID NO: 2424 - protein, 9 aa, synthetic construct
NTTIYQQQP

SEQ ID NO: 2425 - protein, 9 aa, synthetic construct
NVDGQCTVA

SEQ ID NO: 2426 - protein, 9 aa, synthetic construct
NVDGRHPMT

SEQ ID NO: 2427 - protein, 9 aa, synthetic construct
NVDHRFDAV

SEQ ID NO: 2428 - protein, 9 aa, synthetic construct
NVDQKCQAN

SEQ ID NO: 2429 - protein, 9 aa, synthetic construct
NVGYCKWQS

SEQ ID NO: 2430 - protein, 9 aa, synthetic construct
NVISLLNCR

SEQ ID NO: 2431 - protein, 9 aa, synthetic construct
NVNAPKKQM

SEQ ID NO: 2432 - protein, 9 aa, synthetic construct
NVQFHMMMS

SEQ ID NO: 2433 - protein, 9 aa, synthetic construct
NVQQQCNFQ

SEQ ID NO: 2434 - protein, 9 aa, synthetic construct
NVSFTEIGW

SEQ ID NO: 2435 - protein, 9 aa, synthetic construct
NVSGYAAIQ

SEQ ID NO: 2436 - protein, 9 aa, synthetic construct
NVSWYAAIQ

SEQ ID NO: 2437 - protein, 9 aa, synthetic construct
NVTHISVGT

SEQ ID NO: 2438 - protein, 9 aa, synthetic construct
NVVHHPVAP

SEQ ID NO: 2439 - protein, 9 aa, synthetic construct
NVVHVENIG

SEQ ID NO: 2440 - protein, 9 aa, synthetic construct
NVWTCNYQP

SEQ ID NO: 2441 - protein, 9 aa, synthetic construct
NVYMRTCNM

SEQ ID NO: 2442 - protein, 9 aa, synthetic construct
NWAGVQRIM

SEQ ID NO: 2443 - protein, 9 aa, synthetic construct
NWEMAQHDR

SEQ ID NO: 2444 - protein, 9 aa, synthetic construct
NWFLTHPIL

SEQ ID NO: 2445 - protein, 9 aa, synthetic construct
NWLVQHAFQ

SEQ ID NO: 2446 - protein, 9 aa, synthetic construct
NWTQTQAEA

SEQ ID NO: 2447 - protein, 9 aa, synthetic construct
NWYSTNTCF

SEQ ID NO: 2448 - protein, 9 aa, synthetic construct
NYDFLHHVE

SEQ ID NO: 2449 - protein, 9 aa, synthetic construct
NYELYKQVA

SEQ ID NO: 2450 - protein, 9 aa, synthetic construct
NYGPKMLTP

SEQ ID NO: 2451 - protein, 9 aa, synthetic construct
NYMQTTNDD

SEQ ID NO: 2452 - protein, 9 aa, synthetic construct
NYNHFFAAD

SEQ ID NO: 2453 - protein, 9 aa, synthetic construct
NYQSEMINW

SEQ ID NO: 2454 - protein, 9 aa, synthetic construct
NYQSFGLFA

SEQ ID NO: 2455 - protein, 9 aa, synthetic construct
NYYANGNWP

SEQ ID NO: 2456 - protein, 9 aa, synthetic construct
PACYSDVLN

SEQ ID NO: 2457 - protein, 9 aa, synthetic construct
PADLCDTCQ

SEQ ID NO: 2458 - protein, 9 aa, synthetic construct
PCFFRHNYW

SEQ ID NO: 2459 - protein, 9 aa, synthetic construct
PCPTAINQH

SEQ ID NO: 2460 - protein, 9 aa, synthetic construct
PDDDFGSCE

SEQ ID NO: 2461 - protein, 9 aa, synthetic construct
PDDYFGTCE

SEQ ID NO: 2462 - protein, 9 aa, synthetic construct
PDECGFGLT

SEQ ID NO: 2463 - protein, 9 aa, synthetic construct
PDMVNDWWY

SEQ ID NO: 2464 - protein, 9 aa, synthetic construct
PDNQFSRVV

SEQ ID NO: 2465 - protein, 9 aa, synthetic construct
PDQYLVIGD

SEQ ID NO: 2466 - protein, 9 aa, synthetic construct
PDSPGVCSC

SEQ ID NO: 2467 - protein, 9 aa, synthetic construct
PEFYVKKFD

SEQ ID NO: 2468 - protein, 9 aa, synthetic construct
PEFYVQKFD

SEQ ID NO: 2469 - protein, 9 aa, synthetic construct
PFAEKAPDV

SEQ ID NO: 2470 - protein, 9 aa, synthetic construct
PGHSDKSSN

SEQ ID NO: 2471 - protein, 9 aa, synthetic construct
PGLLIPNGK

SEQ ID NO: 2472 - protein, 9 aa, synthetic construct
PHATYNKPT

SEQ ID NO: 2473 - protein, 9 aa, synthetic construct
PHPDSAVQL

SEQ ID NO: 2474 - protein, 9 aa, synthetic construct
PIIKGEPAD

SEQ ID NO: 2475 - protein, 9 aa, synthetic construct
PIIKRVSWT

SEQ ID NO: 2476 - protein, 9 aa, synthetic construct
PILNVMCAE

SEQ ID NO: 2477 - protein, 9 aa, synthetic construct
PKHSDKSHN

SEQ ID NO: 2478 - protein, 9 aa, synthetic construct
PKMIKQPVS

SEQ ID NO: 2479 - protein, 9 aa, synthetic construct
PKQYWQHWF

SEQ ID NO: 2480 - protein, 9 aa, synthetic construct
PKRIRYRTK

SEQ ID NO: 2481 - protein, 9 aa, synthetic construct
PKRYQAWTW

SEQ ID NO: 2482 - protein, 9 aa, synthetic construct
PKSCFQCTA

SEQ ID NO: 2483 - protein, 9 aa, synthetic construct
PKWWPIQYD

SEQ ID NO: 2484 - protein, 9 aa, synthetic construct
PLCCTHWGT

SEQ ID NO: 2485 - protein, 9 aa, synthetic construct
PLQNWFSAQ

SEQ ID NO: 2486 - protein, 9 aa, synthetic construct
PLRAECQWA

SEQ ID NO: 2487 - protein, 9 aa, synthetic construct
PLRPECPWA

SEQ ID NO: 2488 - protein, 9 aa, synthetic construct
PMSVTNSAY

SEQ ID NO: 2489 - protein, 9 aa, synthetic construct
PMVHGLVYS

SEQ ID NO: 2490 - protein, 9 aa, synthetic construct
PPDMQSAKW

SEQ ID NO: 2491 - protein, 9 aa, synthetic construct
PPFKAAKYS

SEQ ID NO: 2492 - protein, 9 aa, synthetic construct
PPMISHCEP

SEQ ID NO: 2493 - protein, 9 aa, synthetic construct
PPPLKAPMY

SEQ ID NO: 2494 - protein, 9 aa, synthetic construct
PPPPPPPPP

SEQ ID NO: 2495 - protein, 9 aa, synthetic construct
PQTLWDKSG

SEQ ID NO: 2496 - protein, 9 aa, synthetic construct
PRHTMLGPS

SEQ ID NO: 2497 - protein, 9 aa, synthetic construct
PRNPLQVQN

SEQ ID NO: 2498 - protein, 9 aa, synthetic construct
PRPLKAPMY

SEQ ID NO: 2499 - protein, 9 aa, synthetic construct
PSYTMHACP

SEQ ID NO: 2500 - protein, 9 aa, synthetic construct
PTAAFMQFM

SEQ ID NO: 2501 - protein, 9 aa, synthetic construct
PTDGINISG

SEQ ID NO: 2502 - protein, 9 aa, synthetic construct
PTEFHINVQ

SEQ ID NO: 2503 - protein, 9 aa, synthetic construct
PTEKTHGPL

SEQ ID NO: 2504 - protein, 9 aa, synthetic construct
PTHNLCMRV

SEQ ID NO: 2505 - protein, 9 aa, synthetic construct
PTQFYGPAF

SEQ ID NO: 2506 - protein, 9 aa, synthetic construct
PTRLTVYRC

SEQ ID NO: 2507 - protein, 9 aa, synthetic construct
PTYPYEWFQ

SEQ ID NO: 2508 - protein, 9 aa, synthetic construct
PVEVGQNQC

SEQ ID NO: 2509 - protein, 9 aa, synthetic construct
PVHFWTQAK

SEQ ID NO: 2510 - protein, 9 aa, synthetic construct
PVTHPQTSK

SEQ ID NO: 2511 - protein, 9 aa, synthetic construct
PWRTRVGAR

SEQ ID NO: 2512 - protein, 9 aa, synthetic construct
PWTEMPNKI

SEQ ID NO: 2513 - protein, 9 aa, synthetic construct
PWTEMSNKI

SEQ ID NO: 2514 - protein, 9 aa, synthetic construct
PYCWLSTAF

SEQ ID NO: 2515 - protein, 9 aa, synthetic construct
PYKTQEGDG

SEQ ID NO: 2516 - protein, 9 aa, synthetic construct
PYKTQEWYG

SEQ ID NO: 2517 - protein, 9 aa, synthetic construct
PYQPLSCPP

SEQ ID NO: 2518 - protein, 9 aa, synthetic construct
QACNITNSG

SEQ ID NO: 2519 - protein, 9 aa, synthetic construct
QADNARSVH

SEQ ID NO: 2520 - protein, 9 aa, synthetic construct
QADTLQHWD

SEQ ID NO: 2521 - protein, 9 aa, synthetic construct
QAEGHFTNC

SEQ ID NO: 2522 - protein, 9 aa, synthetic construct
QAEHRLNAD

SEQ ID NO: 2523 - protein, 9 aa, synthetic construct
QAGFIQNNQ

SEQ ID NO: 2524 - protein, 9 aa, synthetic construct
QAGGSGFNE

SEQ ID NO: 2525 - protein, 9 aa, synthetic construct
QAGSSFHQA

SEQ ID NO: 2526 - protein, 9 aa, synthetic construct
QAHISPSMC

SEQ ID NO: 2527 - protein, 9 aa, synthetic construct
QAHTNMQVH

SEQ ID NO: 2528 - protein, 9 aa, synthetic construct
QAHWWHAHH

SEQ ID NO: 2529 - protein, 9 aa, synthetic construct
QAIANNAMQ

SEQ ID NO: 2530 - protein, 9 aa, synthetic construct
QAIHMPLFT

SEQ ID NO: 2531 - protein, 9 aa, synthetic construct
QAILRQNLP

SEQ ID NO: 2532 - protein, 9 aa, synthetic construct
QAIPRENPM

SEQ ID NO: 2533 - protein, 9 aa, synthetic construct
QAIPYSFCE

SEQ ID NO: 2534 - protein, 9 aa, synthetic construct
QAIQVGMCH

SEQ ID NO: 2535 - protein, 9 aa, synthetic construct
QAITGDRSN

SEQ ID NO: 2536 - protein, 9 aa, synthetic construct
QALMLTRQQ

SEQ ID NO: 2537 - protein, 9 aa, synthetic construct
QAMHKADHS

SEQ ID NO: 2538 - protein, 9 aa, synthetic construct
QAMPNNMCC

SEQ ID NO: 2539 - protein, 9 aa, synthetic construct
QAMTNGIAC

SEQ ID NO: 2540 - protein, 9 aa, synthetic construct
QANFGMTQL

SEQ ID NO: 2541 - protein, 9 aa, synthetic construct
QANPCSFGN

SEQ ID NO: 2542 - protein, 9 aa, synthetic construct
QANPRNRTA

SEQ ID NO: 2543 - protein, 9 aa, synthetic construct
QANSNIHQP

SEQ ID NO: 2544 - protein, 9 aa, synthetic construct
QANWTECID

SEQ ID NO: 2545 - protein, 9 aa, synthetic construct
QAPDQSYMP

SEQ ID NO: 2546 - protein, 9 aa, synthetic construct
QASWHSVDQ

SEQ ID NO: 2547 - protein, 9 aa, synthetic construct
QATLEWAHE

SEQ ID NO: 2548 - protein, 9 aa, synthetic construct
QATLRSSCS

SEQ ID NO: 2549 - protein, 9 aa, synthetic construct
QATMIHHDD

SEQ ID NO: 2550 - protein, 9 aa, synthetic construct
QATNEHIFW

SEQ ID NO: 2551 - protein, 9 aa, synthetic construct
QATVCHFHA

SEQ ID NO: 2552 - protein, 9 aa, synthetic construct
QATWEGIRD

SEQ ID NO: 2553 - protein, 9 aa, synthetic construct
QATWQCRYF

SEQ ID NO: 2554 - protein, 9 aa, synthetic construct
QAVCSSNAM

SEQ ID NO: 2555 - protein, 9 aa, synthetic construct
QAVFEDADN

SEQ ID NO: 2556 - protein, 9 aa, synthetic construct
QAWNFTIFH

SEQ ID NO: 2557 - protein, 9 aa, synthetic construct
QAWSYDNER

SEQ ID NO: 2558 - protein, 9 aa, synthetic construct
QAYAYLNSS

SEQ ID NO: 2559 - protein, 9 aa, synthetic construct
QAYQYRSCK

SEQ ID NO: 2560 - protein, 9 aa, synthetic construct
QCANGYQSQ

SEQ ID NO: 2561 - protein, 9 aa, synthetic construct
QCAPCDICC

SEQ ID NO: 2562 - protein, 9 aa, synthetic construct
QCDFMIIEY

SEQ ID NO: 2563 - protein, 9 aa, synthetic construct
QCDFRRKDY

SEQ ID NO: 2564 - protein, 9 aa, synthetic construct
QCEPIPFEP

SEQ ID NO: 2565 - protein, 9 aa, synthetic construct
QCEQDAQQE

SEQ ID NO: 2566 - protein, 9 aa, synthetic construct
QCGEIHRAY

SEQ ID NO: 2567 - protein, 9 aa, synthetic construct
QCGQQMKMC

SEQ ID NO: 2568 - protein, 9 aa, synthetic construct
QCHHGYIYE

SEQ ID NO: 2569 - protein, 9 aa, synthetic construct
QCHQNYGLI

SEQ ID NO: 2570 - protein, 9 aa, synthetic construct
QCITGNAGA

SEQ ID NO: 2571 - protein, 9 aa, synthetic construct
QCLQTNPYN

SEQ ID NO: 2572 - protein, 9 aa, synthetic construct
QCMFRIDWD

SEQ ID NO: 2573 - protein, 9 aa, synthetic construct
QCMFRIDWY

SEQ ID NO: 2574 - protein, 9 aa, synthetic construct
QCNWIHNTM

SEQ ID NO: 2575 - protein, 9 aa, synthetic construct
QCQHDMHCE

SEQ ID NO: 2576 - protein, 9 aa, synthetic construct
QCQYPSHFM

SEQ ID NO: 2577 - protein, 9 aa, synthetic construct
QCSGYHWMK

SEQ ID NO: 2578 - protein, 9 aa, synthetic construct
QCSWHGVDQ

SEQ ID NO: 2579 - protein, 9 aa, synthetic construct
QCTQMVCCG

SEQ ID NO: 2580 - protein, 9 aa, synthetic construct
QCVEPPQNC

SEQ ID NO: 2581 - protein, 9 aa, synthetic construct
QCVEPPQNW

SEQ ID NO: 2582 - protein, 9 aa, synthetic construct
QCVKFMQYN

SEQ ID NO: 2583 - protein, 9 aa, synthetic construct
QCVMDGCMA

SEQ ID NO: 2584 - protein, 9 aa, synthetic construct
QDDLIYQTG

SEQ ID NO: 2585 - protein, 9 aa, synthetic construct
QDFYIMAMG

SEQ ID NO: 2586 - protein, 9 aa, synthetic construct
QDMSAWPDG

SEQ ID NO: 2587 - protein, 9 aa, synthetic construct
QDVVNIEAA

SEQ ID NO: 2588 - protein, 9 aa, synthetic construct
QEIPAMQQQ

SEQ ID NO: 2589 - protein, 9 aa, synthetic construct
QETMIGQSF

SEQ ID NO: 2590 - protein, 9 aa, synthetic construct
QEVFELDNM

SEQ ID NO: 2591 - protein, 9 aa, synthetic construct
QEVRQFCSS

SEQ ID NO: 2592 - protein, 9 aa, synthetic construct
QFAFRGSHI

SEQ ID NO: 2593 - protein, 9 aa, synthetic construct
QFAIQEGAI

SEQ ID NO: 2594 - protein, 9 aa, synthetic construct
QFCTSCASN

SEQ ID NO: 2595 - protein, 9 aa, synthetic construct
QFEGQSKHE

SEQ ID NO: 2596 - protein, 9 aa, synthetic construct
QFEGWVHNE

SEQ ID NO: 2597 - protein, 9 aa, synthetic construct
QFGLINEHV

SEQ ID NO: 2598 - protein, 9 aa, synthetic construct
QFHQQVIWS

SEQ ID NO: 2599 - protein, 9 aa, synthetic construct
QFILTPRDF

SEQ ID NO: 2600 - protein, 9 aa, synthetic construct
QFKNNWQIE

SEQ ID NO: 2601 - protein, 9 aa, synthetic construct
QFLDNQQAF

SEQ ID NO: 2602 - protein, 9 aa, synthetic construct
QFLEAPMMH

SEQ ID NO: 2603 - protein, 9 aa, synthetic construct
QFLSMMNCF

SEQ ID NO: 2604 - protein, 9 aa, synthetic construct
QFMQHPQMQ

SEQ ID NO: 2605 - protein, 9 aa, synthetic construct
QFNPLQDQC

SEQ ID NO: 2606 - protein, 9 aa, synthetic construct
QFNYVMIGD

SEQ ID NO: 2607 - protein, 9 aa, synthetic construct
QFQWSMEHK

SEQ ID NO: 2608 - protein, 9 aa, synthetic construct
QFRYMGHQI

SEQ ID NO: 2609 - protein, 9 aa, synthetic construct
QFSEFVRWN

SEQ ID NO: 2610 - protein, 9 aa, synthetic construct
QFSHIQAAP

SEQ ID NO: 2611 - protein, 9 aa, synthetic construct
QFSPCVKMF

SEQ ID NO: 2612 - protein, 9 aa, synthetic construct
QFTIHERID

SEQ ID NO: 2613 - protein, 9 aa, synthetic construct
QFTYFNCWS

SEQ ID NO: 2614 - protein, 9 aa, synthetic construct
QFVNWQRLF

SEQ ID NO: 2615 - protein, 9 aa, synthetic construct
QGAMKQTCK

SEQ ID NO: 2616 - protein, 9 aa, synthetic construct
QGDFDQTVL

SEQ ID NO: 2617 - protein, 9 aa, synthetic construct
QGDPDQTTL

SEQ ID NO: 2618 - protein, 9 aa, synthetic construct
QGEFLIGQS

SEQ ID NO: 2619 - protein, 9 aa, synthetic construct
QGESRFMFQ

SEQ ID NO: 2620 - protein, 9 aa, synthetic construct
QGFVVHSPS

SEQ ID NO: 2621 - protein, 9 aa, synthetic construct
QGGFNYAAS

SEQ ID NO: 2622 - protein, 9 aa, synthetic construct
QGGYASFHS

SEQ ID NO: 2623 - protein, 9 aa, synthetic construct
QGHKTMHVF

SEQ ID NO: 2624 - protein, 9 aa, synthetic construct
QGQHVTLAW

SEQ ID NO: 2625 - protein, 9 aa, synthetic construct
QGTHTHWLG

SEQ ID NO: 2626 - protein, 9 aa, synthetic construct
QGTTDMPMY

SEQ ID NO: 2627 - protein, 9 aa, synthetic construct
QGVSTRCHC

SEQ ID NO: 2628 - protein, 9 aa, synthetic construct
QHCQGLFWS

SEQ ID NO: 2629 - protein, 9 aa, synthetic construct
QHCQGLSWS

SEQ ID NO: 2630 - protein, 9 aa, synthetic construct
QHDFTSCYW

SEQ ID NO: 2631 - protein, 9 aa, synthetic construct
QHFNMVQGL

SEQ ID NO: 2632 - protein, 9 aa, synthetic construct
QHIWAPMGM

SEQ ID NO: 2633 - protein, 9 aa, synthetic construct
QHLHSEWGS

SEQ ID NO: 2634 - protein, 9 aa, synthetic construct
QHLHSMWGY

SEQ ID NO: 2635 - protein, 9 aa, synthetic construct
QHMHTTMQY

SEQ ID NO: 2636 - protein, 9 aa, synthetic construct
QHMPSKRLD

SEQ ID NO: 2637 - protein, 9 aa, synthetic construct
QHQTIDEQF

SEQ ID NO: 2638 - protein, 9 aa, synthetic construct
QHRMGFSWM

SEQ ID NO: 2639 - protein, 9 aa, synthetic construct
QHSTYWTGV

SEQ ID NO: 2640 - protein, 9 aa, synthetic construct
QHVATQNLG

SEQ ID NO: 2641 - protein, 9 aa, synthetic construct
QHVSVGDCV

SEQ ID NO: 2642 - protein, 9 aa, synthetic construct
QHWFVKCCV

SEQ ID NO: 2643 - protein, 9 aa, synthetic construct
QHYHTCMQY

SEQ ID NO: 2644 - protein, 9 aa, synthetic construct
QIAHCQYNE

SEQ ID NO: 2645 - protein, 9 aa, synthetic construct
QIANEDTYA

SEQ ID NO: 2646 - protein, 9 aa, synthetic construct
QIDIQMAWP

SEQ ID NO: 2647 - protein, 9 aa, synthetic construct
QIELFMDMD

SEQ ID NO: 2648 - protein, 9 aa, synthetic construct
QIFGIQFAG

SEQ ID NO: 2649 - protein, 9 aa, synthetic construct
QIIPGGFKH

SEQ ID NO: 2650 - protein, 9 aa, synthetic construct
QIKLSPMDP

SEQ ID NO: 2651 - protein, 9 aa, synthetic construct
QIMQHPQMQ

SEQ ID NO: 2652 - protein, 9 aa, synthetic construct
QIQCTMISQ

SEQ ID NO: 2653 - protein, 9 aa, synthetic construct
QIQDFFTLP

SEQ ID NO: 2654 - protein, 9 aa, synthetic construct
QISNWGFGA

SEQ ID NO: 2655 - protein, 9 aa, synthetic construct
QITDNLFEY

SEQ ID NO: 2656 - protein, 9 aa, synthetic construct
QITDWYQFF

SEQ ID NO: 2657 - protein, 9 aa, synthetic construct
QIVYHLLNG

SEQ ID NO: 2658 - protein, 9 aa, synthetic construct
QIYSLASTW

SEQ ID NO: 2659 - protein, 9 aa, synthetic construct
QKCPINQPR

SEQ ID NO: 2660 - protein, 9 aa, synthetic construct
QKGMMLDCA

SEQ ID NO: 2661 - protein, 9 aa, synthetic construct
QKGPHNMSE

SEQ ID NO: 2662 - protein, 9 aa, synthetic construct
QKIPFDHDA

SEQ ID NO: 2663 - protein, 9 aa, synthetic construct
QKIYSWGPI

SEQ ID NO: 2664 - protein, 9 aa, synthetic construct
QKQQGTCGN

SEQ ID NO: 2665 - protein, 9 aa, synthetic construct
QLDTMMYTN

SEQ ID NO: 2666 - protein, 9 aa, synthetic construct
QLELFNSAY

SEQ ID NO: 2667 - protein, 9 aa, synthetic construct
QLEPQVNSD

SEQ ID NO: 2668 - protein, 9 aa, synthetic construct
QLFCWVTSK

SEQ ID NO: 2669 - protein, 9 aa, synthetic construct
QLFVWVTAK

SEQ ID NO: 2670 - protein, 9 aa, synthetic construct
QLGGVEFYT

SEQ ID NO: 2671 - protein, 9 aa, synthetic construct
QLHCVQMQS

SEQ ID NO: 2672 - protein, 9 aa, synthetic construct
QLKEVMLQY

SEQ ID NO: 2673 - protein, 9 aa, synthetic construct
QLMVAFLCL

SEQ ID NO: 2674 - protein, 9 aa, synthetic construct
QLNQWMFAG

SEQ ID NO: 2675 - protein, 9 aa, synthetic construct
QLSQSSTAY

SEQ ID NO: 2676 - protein, 9 aa, synthetic construct
QLTAFCWQE

SEQ ID NO: 2677 - protein, 9 aa, synthetic construct
QLTAFGVQE

SEQ ID NO: 2678 - protein, 9 aa, synthetic construct
QLVWNQKQQ

SEQ ID NO: 2679 - protein, 9 aa, synthetic construct
QMAEFEAEA

SEQ ID NO: 2680 - protein, 9 aa, synthetic construct
QMDHRHTFE

SEQ ID NO: 2681 - protein, 9 aa, synthetic construct
QMDHRHTVC

SEQ ID NO: 2682 - protein, 9 aa, synthetic construct
QMEDTFQNS

SEQ ID NO: 2683 - protein, 9 aa, synthetic construct
QMEQFGIPG

SEQ ID NO: 2684 - protein, 9 aa, synthetic construct
QMFCKNTDM

SEQ ID NO: 2685 - protein, 9 aa, synthetic construct
QMFIFQANN

SEQ ID NO: 2686 - protein, 9 aa, synthetic construct
QMFLWYGHN

SEQ ID NO: 2687 - protein, 9 aa, synthetic construct
QMGYREERM

SEQ ID NO: 2688 - protein, 9 aa, synthetic construct
QMHICMYEG

SEQ ID NO: 2689 - protein, 9 aa, synthetic construct
QMHIVHCTG

SEQ ID NO: 2690 - protein, 9 aa, synthetic construct
QMHTGATWG

SEQ ID NO: 2691 - protein, 9 aa, synthetic construct
QMHTQATNG

SEQ ID NO: 2692 - protein, 9 aa, synthetic construct
QMKPLINDE

SEQ ID NO: 2693 - protein, 9 aa, synthetic construct
QMMPAYHTE

SEQ ID NO: 2694 - protein, 9 aa, synthetic construct
QMMYRDTSE

SEQ ID NO: 2695 - protein, 9 aa, synthetic construct
QMMYWSVIE

SEQ ID NO: 2696 - protein, 9 aa, synthetic construct
QMNQFGVGL

SEQ ID NO: 2697 - protein, 9 aa, synthetic construct
QMNQLFCSS

SEQ ID NO: 2698 - protein, 9 aa, synthetic construct
QMRDIRAMG

SEQ ID NO: 2699 - protein, 9 aa, synthetic construct
QMRIQTQDP

SEQ ID NO: 2700 - protein, 9 aa, synthetic construct
QMVQYQWWN

SEQ ID NO: 2701 - protein, 9 aa, synthetic construct
QMVRFNNSA

SEQ ID NO: 2702 - protein, 9 aa, synthetic construct
QMVSGDMED

SEQ ID NO: 2703 - protein, 9 aa, synthetic construct
QMVSYEAYR

SEQ ID NO: 2704 - protein, 9 aa, synthetic construct
QNAIVTQFA

SEQ ID NO: 2705 - protein, 9 aa, synthetic construct
QNAPYMENA

SEQ ID NO: 2706 - protein, 9 aa, synthetic construct
QNCFTYEDQ

SEQ ID NO: 2707 - protein, 9 aa, synthetic construct
QNENFNTGC

SEQ ID NO: 2708 - protein, 9 aa, synthetic construct
QNGHTGVAI

SEQ ID NO: 2709 - protein, 9 aa, synthetic construct
QNICNQQQD

SEQ ID NO: 2710 - protein, 9 aa, synthetic construct
QNICNQQQY

SEQ ID NO: 2711 - protein, 9 aa, synthetic construct
QNILAGDCI

SEQ ID NO: 2712 - protein, 9 aa, synthetic construct
QNKHLNGLM

SEQ ID NO: 2713 - protein, 9 aa, synthetic construct
QNMLAGDCM

SEQ ID NO: 2714 - protein, 9 aa, synthetic construct
QNNTTRGFT

SEQ ID NO: 2715 - protein, 9 aa, synthetic construct
QNQSADVDA

SEQ ID NO: 2716 - protein, 9 aa, synthetic construct
QNTPQHNFM

SEQ ID NO: 2717 - protein, 9 aa, synthetic construct
QNVCINQAM

SEQ ID NO: 2718 - protein, 9 aa, synthetic construct
QNYYYPPMH

SEQ ID NO: 2719 - protein, 9 aa, synthetic construct
QPAMENTTP

SEQ ID NO: 2720 - protein, 9 aa, synthetic construct
QPKALELVP

SEQ ID NO: 2721 - protein, 9 aa, synthetic construct
QPYQQSQMD

SEQ ID NO: 2722 - protein, 9 aa, synthetic construct
QPYQQSQMG

SEQ ID NO: 2723 - protein, 9 aa, synthetic construct
QQAMWLHSS

SEQ ID NO: 2724 - protein, 9 aa, synthetic construct
QQCIPLTWE

SEQ ID NO: 2725 - protein, 9 aa, synthetic construct
QQECKHKMQ

SEQ ID NO: 2726 - protein, 9 aa, synthetic construct
QQEQLDFSD

SEQ ID NO: 2727 - protein, 9 aa, synthetic construct
QQFTIQDHK

SEQ ID NO: 2728 - protein, 9 aa, synthetic construct
QQLGPKFEK

SEQ ID NO: 2729 - protein, 9 aa, synthetic construct
QQQQTNFQN

SEQ ID NO: 2730 - protein, 9 aa, synthetic construct
QQRFCCPWD

SEQ ID NO: 2731 - protein, 9 aa, synthetic construct
QQSFSVDVN

SEQ ID NO: 2732 - protein, 9 aa, synthetic construct
QQSFYCANV

SEQ ID NO: 2733 - protein, 9 aa, synthetic construct
QQSNLNLGK

SEQ ID NO: 2734 - protein, 9 aa, synthetic construct
QQSVCQVQN

SEQ ID NO: 2735 - protein, 9 aa, synthetic construct
QQTMMEAFD

SEQ ID NO: 2736 - protein, 9 aa, synthetic construct
QQVIANLAG

SEQ ID NO: 2737 - protein, 9 aa, synthetic construct
QRCTWDQAY

SEQ ID NO: 2738 - protein, 9 aa, synthetic construct
QREEANSGC

SEQ ID NO: 2739 - protein, 9 aa, synthetic construct
QRGHGMDSG

SEQ ID NO: 2740 - protein, 9 aa, synthetic construct
QRTTALKDQ

SEQ ID NO: 2741 - protein, 9 aa, synthetic construct
QRVEVSKCR

SEQ ID NO: 2742 - protein, 9 aa, synthetic construct
QRYVQEACP

SEQ ID NO: 2743 - protein, 9 aa, synthetic construct
QRYVQEACS

SEQ ID NO: 2744 - protein, 9 aa, synthetic construct
QSADEAACS

SEQ ID NO: 2745 - protein, 9 aa, synthetic construct
QSADFMFMG

SEQ ID NO: 2746 - protein, 9 aa, synthetic construct
QSAEWYLND

SEQ ID NO: 2747 - protein, 9 aa, synthetic construct
QSAIFNTSH

SEQ ID NO: 2748 - protein, 9 aa, synthetic construct
QSASQVLFP

SEQ ID NO: 2749 - protein, 9 aa, synthetic construct
QSAVWNGCE

SEQ ID NO: 2750 - protein, 9 aa, synthetic construct
QSCWFSHNP

SEQ ID NO: 2751 - protein, 9 aa, synthetic construct
QSDNARSVH

SEQ ID NO: 2752 - protein, 9 aa, synthetic construct
QSFPCMFKD

SEQ ID NO: 2753 - protein, 9 aa, synthetic construct
QSFPHQQAQ

SEQ ID NO: 2754 - protein, 9 aa, synthetic construct
QSFPMQSMQ

SEQ ID NO: 2755 - protein, 9 aa, synthetic construct
QSGAFEKHQ

SEQ ID NO: 2756 - protein, 9 aa, synthetic construct
QSGCREIDW

SEQ ID NO: 2757 - protein, 9 aa, synthetic construct
QSGCTLQFP

SEQ ID NO: 2758 - protein, 9 aa, synthetic construct
QSGNAWGSL

SEQ ID NO: 2759 - protein, 9 aa, synthetic construct
QSHDFANCA

SEQ ID NO: 2760 - protein, 9 aa, synthetic construct
QSHHFLNSD

SEQ ID NO: 2761 - protein, 9 aa, synthetic construct
QSHPSVSNM

SEQ ID NO: 2762 - protein, 9 aa, synthetic construct
QSHSKHDSK

SEQ ID NO: 2763 - protein, 9 aa, synthetic construct
QSHSWVSNM

SEQ ID NO: 2764 - protein, 9 aa, synthetic construct
QSICNQWCQ

SEQ ID NO: 2765 - protein, 9 aa, synthetic construct
QSLNFNQHC

SEQ ID NO: 2766 - protein, 9 aa, synthetic construct
QSLPRYGFD

SEQ ID NO: 2767 - protein, 9 aa, synthetic construct
QSMGKAMNT

SEQ ID NO: 2768 - protein, 9 aa, synthetic construct
QSMQKMMDF

SEQ ID NO: 2769 - protein, 9 aa, synthetic construct
QSMWSAFKH

SEQ ID NO: 2770 - protein, 9 aa, synthetic construct
QSNHFGAGV

SEQ ID NO: 2771 - protein, 9 aa, synthetic construct
QSNLTEAGQ

SEQ ID NO: 2772 - protein, 9 aa, synthetic construct
QSNQVIDQF

SEQ ID NO: 2773 - protein, 9 aa, synthetic construct
QSPYGRKQA

SEQ ID NO: 2774 - protein, 9 aa, synthetic construct
QSQGVVDTS

SEQ ID NO: 2775 - protein, 9 aa, synthetic construct
QSQGVVINS

SEQ ID NO: 2776 - protein, 9 aa, synthetic construct
QSRCLFACI

SEQ ID NO: 2777 - protein, 9 aa, synthetic construct
QSSSSYLWG

SEQ ID NO: 2778 - protein, 9 aa, synthetic construct
QSTDDNICH

SEQ ID NO: 2779 - protein, 9 aa, synthetic construct
QSTHRVGSY

SEQ ID NO: 2780 - protein, 9 aa, synthetic construct
QSTNMDFCG

SEQ ID NO: 2781 - protein, 9 aa, synthetic construct
QSTPILGPK

SEQ ID NO: 2782 - protein, 9 aa, synthetic construct
QSTPTILPK

SEQ ID NO: 2783 - protein, 9 aa, synthetic construct
QSTTYWNAM

SEQ ID NO: 2784 - protein, 9 aa, synthetic construct
QSVHRNTRN

SEQ ID NO: 2785 - protein, 9 aa, synthetic construct
QSVTDNYFY

SEQ ID NO: 2786 - protein, 9 aa, synthetic construct
QSWNVGFTS

SEQ ID NO: 2787 - protein, 9 aa, synthetic construct
QSWSQVAFP

SEQ ID NO: 2788 - protein, 9 aa, synthetic construct
QSWSQVTFP

SEQ ID NO: 2789 - protein, 9 aa, synthetic construct
QSYIMGSFH

SEQ ID NO: 2790 - protein, 9 aa, synthetic construct
QTADIETNQ

SEQ ID NO: 2791 - protein, 9 aa, synthetic construct
QTAEFKRHQ

SEQ ID NO: 2792 - protein, 9 aa, synthetic construct
QTAQIELYH

SEQ ID NO: 2793 - protein, 9 aa, synthetic construct
QTAQINCSM

SEQ ID NO: 2794 - protein, 9 aa, synthetic construct
QTDKPVYSA

SEQ ID NO: 2795 - protein, 9 aa, synthetic construct
QTEEYKAVE

SEQ ID NO: 2796 - protein, 9 aa, synthetic construct
QTELARENT

SEQ ID NO: 2797 - protein, 9 aa, synthetic construct
QTERKFSAL

SEQ ID NO: 2798 - protein, 9 aa, synthetic construct
QTFSTMGTD

SEQ ID NO: 2799 - protein, 9 aa, synthetic construct
QTGMQWTGG

SEQ ID NO: 2800 - protein, 9 aa, synthetic construct
QTGSAQSAF

SEQ ID NO: 2801 - protein, 9 aa, synthetic construct
QTGTFGINS

SEQ ID NO: 2802 - protein, 9 aa, synthetic construct
QTILDVQSV

SEQ ID NO: 2803 - protein, 9 aa, synthetic construct
QTKDWGFVH

SEQ ID NO: 2804 - protein, 9 aa, synthetic construct
QTKVLFERD

SEQ ID NO: 2805 - protein, 9 aa, synthetic construct
QTLSRDDWC

SEQ ID NO: 2806 - protein, 9 aa, synthetic construct
QTLSRLDIC

SEQ ID NO: 2807 - protein, 9 aa, synthetic construct
QTMTQQYPE

SEQ ID NO: 2808 - protein, 9 aa, synthetic construct
QTNMVDRIF

SEQ ID NO: 2809 - protein, 9 aa, synthetic construct
QTNPLGCMC

SEQ ID NO: 2810 - protein, 9 aa, synthetic construct
QTNTREGWG

SEQ ID NO: 2811 - protein, 9 aa, synthetic construct
QTQMGQYAS

SEQ ID NO: 2812 - protein, 9 aa, synthetic construct
QTRLWNNYC

SEQ ID NO: 2813 - protein, 9 aa, synthetic construct
QTSEEQSDW

SEQ ID NO: 2814 - protein, 9 aa, synthetic construct
QTSLTDSIL

SEQ ID NO: 2815 - protein, 9 aa, synthetic construct
QTSPKFCMC

SEQ ID NO: 2816 - protein, 9 aa, synthetic construct
QTSYSYADP

SEQ ID NO: 2817 - protein, 9 aa, synthetic construct
QTTDMFQSF

SEQ ID NO: 2818 - protein, 9 aa, synthetic construct
QTTPYVWVF

SEQ ID NO: 2819 - protein, 9 aa, synthetic construct
QTTQETAQC

SEQ ID NO: 2820 - protein, 9 aa, synthetic construct
QTTVEKICH

SEQ ID NO: 2821 - protein, 9 aa, synthetic construct
QTVEWTTQQ

SEQ ID NO: 2822 - protein, 9 aa, synthetic construct
QTVIQWHDW

SEQ ID NO: 2823 - protein, 9 aa, synthetic construct
QTVKNVYSA

SEQ ID NO: 2824 - protein, 9 aa, synthetic construct
QTWFKGFAC

SEQ ID NO: 2825 - protein, 9 aa, synthetic construct
QTYQYRSCK

SEQ ID NO: 2826 - protein, 9 aa, synthetic construct
QVEGSNMHW

SEQ ID NO: 2827 - protein, 9 aa, synthetic construct
QVESRCMFQ

SEQ ID NO: 2828 - protein, 9 aa, synthetic construct
QVEVGEKYH

SEQ ID NO: 2829 - protein, 9 aa, synthetic construct
QVEYGNHDM

SEQ ID NO: 2830 - protein, 9 aa, synthetic construct
QVFCKHEYT

SEQ ID NO: 2831 - protein, 9 aa, synthetic construct
QVHAINDGH

SEQ ID NO: 2832 - protein, 9 aa, synthetic construct
QVHHNMQVH

SEQ ID NO: 2833 - protein, 9 aa, synthetic construct
QVHLPVEQG

SEQ ID NO: 2834 - protein, 9 aa, synthetic construct
QVIPAMMKQ

SEQ ID NO: 2835 - protein, 9 aa, synthetic construct
QVMHTLRTY

SEQ ID NO: 2836 - protein, 9 aa, synthetic construct
QVNQGFKAS

SEQ ID NO: 2837 - protein, 9 aa, synthetic construct
QVQSGQFIF

SEQ ID NO: 2838 - protein, 9 aa, synthetic construct
QVSCVIMTP

SEQ ID NO: 2839 - protein, 9 aa, synthetic construct
QVSQQEGIV

SEQ ID NO: 2840 - protein, 9 aa, synthetic construct
QVTFVHCEN

SEQ ID NO: 2841 - protein, 9 aa, synthetic construct
QVTHKWFAM

SEQ ID NO: 2842 - protein, 9 aa, synthetic construct
QVTNQNKTR

SEQ ID NO: 2843 - protein, 9 aa, synthetic construct
QVTPNFSCD

SEQ ID NO: 2844 - protein, 9 aa, synthetic construct
QVVDMQDWC

SEQ ID NO: 2845 - protein, 9 aa, synthetic construct
QVVPRYYSD

SEQ ID NO: 2846 - protein, 9 aa, synthetic construct
QWAKMFADN

SEQ ID NO: 2847 - protein, 9 aa, synthetic construct
QWAPIMPLS

SEQ ID NO: 2848 - protein, 9 aa, synthetic construct
QWARWSVQD

SEQ ID NO: 2849 - protein, 9 aa, synthetic construct
QWCESNSHL

SEQ ID NO: 2850 - protein, 9 aa, synthetic construct
QWDCCVQDR

SEQ ID NO: 2851 - protein, 9 aa, synthetic construct
QWDKVDGMM

SEQ ID NO: 2852 - protein, 9 aa, synthetic construct
QWDLVGAVG

SEQ ID NO: 2853 - protein, 9 aa, synthetic construct
QWDNKNQFP

SEQ ID NO: 2854 - protein, 9 aa, synthetic construct
QWDTAQDCQ

SEQ ID NO: 2855 - protein, 9 aa, synthetic construct
QWDYARQNF

SEQ ID NO: 2856 - protein, 9 aa, synthetic construct
QWEAFEFIL

SEQ ID NO: 2857 - protein, 9 aa, synthetic construct
QWEAFGHID

SEQ ID NO: 2858 - protein, 9 aa, synthetic construct
QWEIYGKMN

SEQ ID NO: 2859 - protein, 9 aa, synthetic construct
QWEKQNAWG

SEQ ID NO: 2860 - protein, 9 aa, synthetic construct
QWENQPAWG

SEQ ID NO: 2861 - protein, 9 aa, synthetic construct
QWHPKHSFA

SEQ ID NO: 2862 - protein, 9 aa, synthetic construct
QWKHLHWTI

SEQ ID NO: 2863 - protein, 9 aa, synthetic construct
QWMLKDSLK

SEQ ID NO: 2864 - protein, 9 aa, synthetic construct
QWMQNQRYM

SEQ ID NO: 2865 - protein, 9 aa, synthetic construct
QWMSKISDL

SEQ ID NO: 2866 - protein, 9 aa, synthetic construct
QWNKNQNAP

SEQ ID NO: 2867 - protein, 9 aa, synthetic construct
QWNLVGKVG

SEQ ID NO: 2868 - protein, 9 aa, synthetic construct
QWPEYTTEA

SEQ ID NO: 2869 - protein, 9 aa, synthetic construct
QWPHYTTEC

SEQ ID NO: 2870 - protein, 9 aa, synthetic construct
QWPPTHDMG

SEQ ID NO: 2871 - protein, 9 aa, synthetic construct
QWQDDNSQF

SEQ ID NO: 2872 - protein, 9 aa, synthetic construct
QWQLTGHLN

SEQ ID NO: 2873 - protein, 9 aa, synthetic construct
QWQRFNHGV

SEQ ID NO: 2874 - protein, 9 aa, synthetic construct
QWQSFLTED

SEQ ID NO: 2875 - protein, 9 aa, synthetic construct
QWRIMTQDP

SEQ ID NO: 2876 - protein, 9 aa, synthetic construct
QWSQARSQY

SEQ ID NO: 2877 - protein, 9 aa, synthetic construct
QWSQMDRMQ

SEQ ID NO: 2878 - protein, 9 aa, synthetic construct
QWVMKHSYH

SEQ ID NO: 2879 - protein, 9 aa, synthetic construct
QYAITYQEG

SEQ ID NO: 2880 - protein, 9 aa, synthetic construct
QYAMFEKMS

SEQ ID NO: 2881 - protein, 9 aa, synthetic construct
QYAMSFTQM

SEQ ID NO: 2882 - protein, 9 aa, synthetic construct
QYDPYIQGD

SEQ ID NO: 2883 - protein, 9 aa, synthetic construct
QYDQASDML

SEQ ID NO: 2884 - protein, 9 aa, synthetic construct
QYFLSMDTE

SEQ ID NO: 2885 - protein, 9 aa, synthetic construct
QYFQSNNQC

SEQ ID NO: 2886 - protein, 9 aa, synthetic construct
QYFQTSNSR

SEQ ID NO: 2887 - protein, 9 aa, synthetic construct
QYGLYKDTQ

SEQ ID NO: 2888 - protein, 9 aa, synthetic construct
QYRSLDSDH

SEQ ID NO: 2889 - protein, 9 aa, synthetic construct
QYRTPDEAI

SEQ ID NO: 2890 - protein, 9 aa, synthetic construct
QYRTQDEAL

SEQ ID NO: 2891 - protein, 9 aa, synthetic construct
QYVGMYTQQ

SEQ ID NO: 2892 - protein, 9 aa, synthetic construct
QYVHMLGEC

SEQ ID NO: 2893 - protein, 9 aa, synthetic construct
RAAGNSIDV

SEQ ID NO: 2894 - protein, 9 aa, synthetic construct
RACMEGWPK

SEQ ID NO: 2895 - protein, 9 aa, synthetic construct
RADNRCGQD

SEQ ID NO: 2896 - protein, 9 aa, synthetic construct
RADSNKQFE

SEQ ID NO: 2897 - protein, 9 aa, synthetic construct
RAEHVLNAD

SEQ ID NO: 2898 - protein, 9 aa, synthetic construct
RAEPINHYN

SEQ ID NO: 2899 - protein, 9 aa, synthetic construct
RAGMCENFG

SEQ ID NO: 2900 - protein, 9 aa, synthetic construct
RAGMEPNFG

SEQ ID NO: 2901 - protein, 9 aa, synthetic construct
RAIDCHRLN

SEQ ID NO: 2902 - protein, 9 aa, synthetic construct
RANAESDQP

SEQ ID NO: 2903 - protein, 9 aa, synthetic construct
RATLGASLH

SEQ ID NO: 2904 - protein, 9 aa, synthetic construct
RATQWDSYP

SEQ ID NO: 2905 - protein, 9 aa, synthetic construct
RAVQLEYCQ

SEQ ID NO: 2906 - protein, 9 aa, synthetic construct
RCDSNDGQM

SEQ ID NO: 2907 - protein, 9 aa, synthetic construct
RCDSVEVQY

SEQ ID NO: 2908 - protein, 9 aa, synthetic construct
RCFFKMEAV

SEQ ID NO: 2909 - protein, 9 aa, synthetic construct
RCIGKEDMT

SEQ ID NO: 2910 - protein, 9 aa, synthetic construct
RCVAEPNEP

SEQ ID NO: 2911 - protein, 9 aa, synthetic construct
RCVDLSMAS

SEQ ID NO: 2912 - protein, 9 aa, synthetic construct
RCYEQHMWP

SEQ ID NO: 2913 - protein, 9 aa, synthetic construct
RDDELLEPG

SEQ ID NO: 2914 - protein, 9 aa, synthetic construct
REAYLNYVA

SEQ ID NO: 2915 - protein, 9 aa, synthetic construct
REEMFVYMP

SEQ ID NO: 2916 - protein, 9 aa, synthetic construct
REFELSIGH

SEQ ID NO: 2917 - protein, 9 aa, synthetic construct
REGKVFDCY

SEQ ID NO: 2918 - protein, 9 aa, synthetic construct
REMCSTGHF

SEQ ID NO: 2919 - protein, 9 aa, synthetic construct
REQMVFRDQ

SEQ ID NO: 2920 - protein, 9 aa, synthetic construct
RFADSKLHD

SEQ ID NO: 2921 - protein, 9 aa, synthetic construct
RFDFLQSWF

SEQ ID NO: 2922 - protein, 9 aa, synthetic construct
RFDLMLKDL

SEQ ID NO: 2923 - protein, 9 aa, synthetic construct
RFDLQMGGG

SEQ ID NO: 2924 - protein, 9 aa, synthetic construct
RFDMQHCFY

SEQ ID NO: 2925 - protein, 9 aa, synthetic construct
RFDMSHQGR

SEQ ID NO: 2926 - protein, 9 aa, synthetic construct
RFDNTTQYG

SEQ ID NO: 2927 - protein, 9 aa, synthetic construct
RFDQFLMHM

SEQ ID NO: 2928 - protein, 9 aa, synthetic construct
RFDQYTFLE

SEQ ID NO: 2929 - protein, 9 aa, synthetic construct
RFEEMDFDM

SEQ ID NO: 2930 - protein, 9 aa, synthetic construct
RFELLMEDH

SEQ ID NO: 2931 - protein, 9 aa, synthetic construct
RFELTQNSL

SEQ ID NO: 2932 - protein, 9 aa, synthetic construct
RFEMSHEQW

SEQ ID NO: 2933 - protein, 9 aa, synthetic construct
RFEPSMKHC

SEQ ID NO: 2934 - protein, 9 aa, synthetic construct
RFEPYMKIC

SEQ ID NO: 2935 - protein, 9 aa, synthetic construct
RFEVSMREA

SEQ ID NO: 2936 - protein, 9 aa, synthetic construct
RFIQMEITQ

SEQ ID NO: 2937 - protein, 9 aa, synthetic construct
RFKMQFVTS

SEQ ID NO: 2938 - protein, 9 aa, synthetic construct
RFSVRDYAP

SEQ ID NO: 2939 - protein, 9 aa, synthetic construct
RFVPNCMSI

SEQ ID NO: 2940 - protein, 9 aa, synthetic construct
RFYFTAEMN

SEQ ID NO: 2941 - protein, 9 aa, synthetic construct
RGDKIHACF

SEQ ID NO: 2942 - protein, 9 aa, synthetic construct
RGGLQFVEA

SEQ ID NO: 2943 - protein, 9 aa, synthetic construct
RGHETYGPI

SEQ ID NO: 2944 - protein, 9 aa, synthetic construct
RGKPTWTEK

SEQ ID NO: 2945 - protein, 9 aa, synthetic construct
RGLQRVRTC

SEQ ID NO: 2946 - protein, 9 aa, synthetic construct
RHDEQPFCK

SEQ ID NO: 2947 - protein, 9 aa, synthetic construct
RHGFKDSGE

SEQ ID NO: 2948 - protein, 9 aa, synthetic construct
RHGNFEAMA

SEQ ID NO: 2949 - protein, 9 aa, synthetic construct
RIDDWAHGR

SEQ ID NO: 2950 - protein, 9 aa, synthetic construct
RIDHAHFQW

SEQ ID NO: 2951 - protein, 9 aa, synthetic construct
RIETPCHGS

SEQ ID NO: 2952 - protein, 9 aa, synthetic construct
RIQQQEDLG

SEQ ID NO: 2953 - protein, 9 aa, synthetic construct
RKKVEVVVE

SEQ ID NO: 2954 - protein, 9 aa, synthetic construct
RKMWQSHCE

SEQ ID NO: 2955 - protein, 9 aa, synthetic construct
RLNYRHYSK

SEQ ID NO: 2956 - protein, 9 aa, synthetic construct
RMAEPVENE

SEQ ID NO: 2957 - protein, 9 aa, synthetic construct
RMDTSSRAE

SEQ ID NO: 2958 - protein, 9 aa, synthetic construct
RMDTSVRCE

SEQ ID NO: 2959 - protein, 9 aa, synthetic construct
RMEGCWGCA

SEQ ID NO: 2960 - protein, 9 aa, synthetic construct
RMKWYLPCV

SEQ ID NO: 2961 - protein, 9 aa, synthetic construct
RMMWQSHCD

SEQ ID NO: 2962 - protein, 9 aa, synthetic construct
RNAKEVPLP

SEQ ID NO: 2963 - protein, 9 aa, synthetic construct
RNDVWEHVF

SEQ ID NO: 2964 - protein, 9 aa, synthetic construct
RNLNLQTTI

SEQ ID NO: 2965 - protein, 9 aa, synthetic construct
RNWLPENYT

SEQ ID NO: 2966 - protein, 9 aa, synthetic construct
RPEAHPHYA

SEQ ID NO: 2967 - protein, 9 aa, synthetic construct
RPEANKHYA

SEQ ID NO: 2968 - protein, 9 aa, synthetic construct
RQDIFPHQD

SEQ ID NO: 2969 - protein, 9 aa, synthetic construct
RRDCIIPMM

SEQ ID NO: 2970 - protein, 9 aa, synthetic construct
RSAWMDYTC

SEQ ID NO: 2971 - protein, 9 aa, synthetic construct
RSDFIAHMH

SEQ ID NO: 2972 - protein, 9 aa, synthetic construct
RSEHFEHIG

SEQ ID NO: 2973 - protein, 9 aa, synthetic construct
RSFMCGLIG

SEQ ID NO: 2974 - protein, 9 aa, synthetic construct
RSGQGEGHM

SEQ ID NO: 2975 - protein, 9 aa, synthetic construct
RSMLVERNT

SEQ ID NO: 2976 - protein, 9 aa, synthetic construct
RSTPEAQQY

SEQ ID NO: 2977 - protein, 9 aa, synthetic construct
RSWTACEID

SEQ ID NO: 2978 - protein, 9 aa, synthetic construct
RTESWSSLA

SEQ ID NO: 2979 - protein, 9 aa, synthetic construct
RTEWMKGVD

SEQ ID NO: 2980 - protein, 9 aa, synthetic construct
RTEYKEGYF

SEQ ID NO: 2981 - protein, 9 aa, synthetic construct
RTFMNDMCE

SEQ ID NO: 2982 - protein, 9 aa, synthetic construct
RTFYVMGTE

SEQ ID NO: 2983 - protein, 9 aa, synthetic construct
RTKYCSAFG

SEQ ID NO: 2984 - protein, 9 aa, synthetic construct
RTSVEMCTM

SEQ ID NO: 2985 - protein, 9 aa, synthetic construct
RVDAFNRGT

SEQ ID NO: 2986 - protein, 9 aa, synthetic construct
RVDIGMGWK

SEQ ID NO: 2987 - protein, 9 aa, synthetic construct
RVDPFPIAH

SEQ ID NO: 2988 - protein, 9 aa, synthetic construct
RVDQRHLPT

SEQ ID NO: 2989 - protein, 9 aa, synthetic construct
RVDVFSYCG

SEQ ID NO: 2990 - protein, 9 aa, synthetic construct
RVGFMEGGM

SEQ ID NO: 2991 - protein, 9 aa, synthetic construct
RVLDNPAEY

SEQ ID NO: 2992 - protein, 9 aa, synthetic construct
RVMEYAAEW

SEQ ID NO: 2993 - protein, 9 aa, synthetic construct
RVQMSCYTE

SEQ ID NO: 2994 - protein, 9 aa, synthetic construct
RVQSGHQRG

SEQ ID NO: 2995 - protein, 9 aa, synthetic construct
RVTMTSETC

SEQ ID NO: 2996 - protein, 9 aa, synthetic construct
RVVQRYLPT

SEQ ID NO: 2997 - protein, 9 aa, synthetic construct
RVWECVCSQ

SEQ ID NO: 2998 - protein, 9 aa, synthetic construct
RWAEMHVQC

SEQ ID NO: 2999 - protein, 9 aa, synthetic construct
RWDFVWYIQ

SEQ ID NO: 3000 - protein, 9 aa, synthetic construct
RWDVDHQSC

SEQ ID NO: 3001 - protein, 9 aa, synthetic construct
RWDVEQMVG

SEQ ID NO: 3002 - protein, 9 aa, synthetic construct
RWDVMLEDR

SEQ ID NO: 3003 - protein, 9 aa, synthetic construct
RWEAYGSQN

SEQ ID NO: 3004 - protein, 9 aa, synthetic construct
RWEIRQMDM

SEQ ID NO: 3005 - protein, 9 aa, synthetic construct
RWEPVQIFK

SEQ ID NO: 3006 - protein, 9 aa, synthetic construct
RWHQGPCHP

SEQ ID NO: 3007 - protein, 9 aa, synthetic construct
RWNTVFKID

SEQ ID NO: 3008 - protein, 9 aa, synthetic construct
RYDEQPFCK

SEQ ID NO: 3009 - protein, 9 aa, synthetic construct
RYDSQHQFK

SEQ ID NO: 3010 - protein, 9 aa, synthetic construct
RYESFTKHP

SEQ ID NO: 3011 - protein, 9 aa, synthetic construct
RYPCTIVEQ

SEQ ID NO: 3012 - protein, 9 aa, synthetic construct
RYQPDPMLM

SEQ ID NO: 3013 - protein, 9 aa, synthetic construct
RYTEMSCDD

SEQ ID NO: 3014 - protein, 9 aa, synthetic construct
SAAAWWANG

SEQ ID NO: 3015 - protein, 9 aa, synthetic construct
SAAEKAMDQ

SEQ ID NO: 3016 - protein, 9 aa, synthetic construct
SADFLFKSF

SEQ ID NO: 3017 - protein, 9 aa, synthetic construct
SADRLDLVL

SEQ ID NO: 3018 - protein, 9 aa, synthetic construct
SAHHSHCNP

SEQ ID NO: 3019 - protein, 9 aa, synthetic construct
SAINMHYIE

SEQ ID NO: 3020 - protein, 9 aa, synthetic construct
SAKDPLQAN

SEQ ID NO: 3021 - protein, 9 aa, synthetic construct
SALAHILSL

SEQ ID NO: 3022 - protein, 9 aa, synthetic construct
SAMCSGSLL

SEQ ID NO: 3023 - protein, 9 aa, synthetic construct
SAMDSLGVH

SEQ ID NO: 3024 - protein, 9 aa, synthetic construct
SAMSVMDNM

SEQ ID NO: 3025 - protein, 9 aa, synthetic construct
SAMTAIRMS

SEQ ID NO: 3026 - protein, 9 aa, synthetic construct
SAMWFTANG

SEQ ID NO: 3027 - protein, 9 aa, synthetic construct
SANNDAFLC

SEQ ID NO: 3028 - protein, 9 aa, synthetic construct
SASHGGLAY

SEQ ID NO: 3029 - protein, 9 aa, synthetic construct
SATCIPHSR

SEQ ID NO: 3030 - protein, 9 aa, synthetic construct
SATDMDGAF

SEQ ID NO: 3031 - protein, 9 aa, synthetic construct
SATFCGINV

SEQ ID NO: 3032 - protein, 9 aa, synthetic construct
SATLHPLSL

SEQ ID NO: 3033 - protein, 9 aa, synthetic construct
SATPHLYCH

SEQ ID NO: 3034 - protein, 9 aa, synthetic construct
SATPHWYCH

SEQ ID NO: 3035 - protein, 9 aa, synthetic construct
SAVASILNH

SEQ ID NO: 3036 - protein, 9 aa, synthetic construct
SAVGGCWGA

SEQ ID NO: 3037 - protein, 9 aa, synthetic construct
SAVGSHSSS

SEQ ID NO: 3038 - protein, 9 aa, synthetic construct
SAWQSSVCM

SEQ ID NO: 3039 - protein, 9 aa, synthetic construct
SCCFQIADR

SEQ ID NO: 3040 - protein, 9 aa, synthetic construct
SCEQDGMDR

SEQ ID NO: 3041 - protein, 9 aa, synthetic construct
SCFCMQHPI

SEQ ID NO: 3042 - protein, 9 aa, synthetic construct
SCFLDHASG

SEQ ID NO: 3043 - protein, 9 aa, synthetic construct
SCFRFTQAW

SEQ ID NO: 3044 - protein, 9 aa, synthetic construct
SCGCMHEDF

SEQ ID NO: 3045 - protein, 9 aa, synthetic construct
SCGCSLYQV

SEQ ID NO: 3046 - protein, 9 aa, synthetic construct
SCGHSLGCF

SEQ ID NO: 3047 - protein, 9 aa, synthetic construct
SCHTDGQWP

SEQ ID NO: 3048 - protein, 9 aa, synthetic construct
SCKAHAAAP

SEQ ID NO: 3049 - protein, 9 aa, synthetic construct
SCLAMDHVY

SEQ ID NO: 3050 - protein, 9 aa, synthetic construct
SCLQMFSWH

SEQ ID NO: 3051 - protein, 9 aa, synthetic construct
SCNFEFLWM

SEQ ID NO: 3052 - protein, 9 aa, synthetic construct
SCNIGQYWP

SEQ ID NO: 3053 - protein, 9 aa, synthetic construct
SCQHAIANQ

SEQ ID NO: 3054 - protein, 9 aa, synthetic construct
SCQHPHDWE

SEQ ID NO: 3055 - protein, 9 aa, synthetic construct
SCQLAIGHE

SEQ ID NO: 3056 - protein, 9 aa, synthetic construct
SCQPVNEHE

SEQ ID NO: 3057 - protein, 9 aa, synthetic construct
SCVQNMINC

SEQ ID NO: 3058 - protein, 9 aa, synthetic construct
SCYSPIADR

SEQ ID NO: 3059 - protein, 9 aa, synthetic construct
SDGMVHNCW

SEQ ID NO: 3060 - protein, 9 aa, synthetic construct
SDLFKMFIE

SEQ ID NO: 3061 - protein, 9 aa, synthetic construct
SDQPMHCWR

SEQ ID NO: 3062 - protein, 9 aa, synthetic construct
SDQPMSCWG

SEQ ID NO: 3063 - protein, 9 aa, synthetic construct
SDQPTMCNV

SEQ ID NO: 3064 - protein, 9 aa, synthetic construct
SELYKCPYF

SEQ ID NO: 3065 - protein, 9 aa, synthetic construct
SETICEWAP

SEQ ID NO: 3066 - protein, 9 aa, synthetic construct
SFCKMCSFG

SEQ ID NO: 3067 - protein, 9 aa, synthetic construct
SFCLFENIT

SEQ ID NO: 3068 - protein, 9 aa, synthetic construct
SFDRGMWTV

SEQ ID NO: 3069 - protein, 9 aa, synthetic construct
SFDRMMWTQ

SEQ ID NO: 3070 - protein, 9 aa, synthetic construct
SFDTCNYFV

SEQ ID NO: 3071 - protein, 9 aa, synthetic construct
SFEKYAGSD

SEQ ID NO: 3072 - protein, 9 aa, synthetic construct
SFFYGTGSE

SEQ ID NO: 3073 - protein, 9 aa, synthetic construct
SFGPLQNCG

SEQ ID NO: 3074 - protein, 9 aa, synthetic construct
SFGTGCKCL

SEQ ID NO: 3075 - protein, 9 aa, synthetic construct
SFHPLMHIA

SEQ ID NO: 3076 - protein, 9 aa, synthetic construct
SFHPTPNDA

SEQ ID NO: 3077 - protein, 9 aa, synthetic construct
SFIGTNRDY

SEQ ID NO: 3078 - protein, 9 aa, synthetic construct
SFIHMSHND

SEQ ID NO: 3079 - protein, 9 aa, synthetic construct
SFLLCHQET

SEQ ID NO: 3080 - protein, 9 aa, synthetic construct
SFLPIGIQE

SEQ ID NO: 3081 - protein, 9 aa, synthetic construct
SFNTNQASV

SEQ ID NO: 3082 - protein, 9 aa, synthetic construct
SFQSTEKCG

SEQ ID NO: 3083 - protein, 9 aa, synthetic construct
SFSFYKCMQ

SEQ ID NO: 3084 - protein, 9 aa, synthetic construct
SFSGIGPQH

SEQ ID NO: 3085 - protein, 9 aa, synthetic construct
SFSKSFAAR

SEQ ID NO: 3086 - protein, 9 aa, synthetic construct
SFSVFNCSH

SEQ ID NO: 3087 - protein, 9 aa, synthetic construct
SFSVVQEQS

SEQ ID NO: 3088 - protein, 9 aa, synthetic construct
SFSWIQSGD

SEQ ID NO: 3089 - protein, 9 aa, synthetic construct
SFSYCDEPV

SEQ ID NO: 3090 - protein, 9 aa, synthetic construct
SFWQIDDFN

SEQ ID NO: 3091 - protein, 9 aa, synthetic construct
SGAGNNYHQ

SEQ ID NO: 3092 - protein, 9 aa, synthetic construct
SGDSKHCHL

SEQ ID NO: 3093 - protein, 9 aa, synthetic construct
SGEPMASCQ

SEQ ID NO: 3094 - protein, 9 aa, synthetic construct
SGEPMTSCQ

SEQ ID NO: 3095 - protein, 9 aa, synthetic construct
SGERWFVYP

SEQ ID NO: 3096 - protein, 9 aa, synthetic construct
SGHMYQEGL

SEQ ID NO: 3097 - protein, 9 aa, synthetic construct
SGISDHCHL

SEQ ID NO: 3098 - protein, 9 aa, synthetic construct
SGPMSDMIS

SEQ ID NO: 3099 - protein, 9 aa, synthetic construct
SGTGYVHGG

SEQ ID NO: 3100 - protein, 9 aa, synthetic construct
SHASISHML

SEQ ID NO: 3101 - protein, 9 aa, synthetic construct
SHASISHVL

SEQ ID NO: 3102 - protein, 9 aa, synthetic construct
SHAVKHEQA

SEQ ID NO: 3103 - protein, 9 aa, synthetic construct
SHDTWCVCT

SEQ ID NO: 3104 - protein, 9 aa, synthetic construct
SHGFIDLQL

SEQ ID NO: 3105 - protein, 9 aa, synthetic construct
SHLDFPVGR

SEQ ID NO: 3106 - protein, 9 aa, synthetic construct
SHLWPNLHE

SEQ ID NO: 3107 - protein, 9 aa, synthetic construct
SHMMQVAQF

SEQ ID NO: 3108 - protein, 9 aa, synthetic construct
SHNNNPSGE

SEQ ID NO: 3109 - protein, 9 aa, synthetic construct
SHQQYPAFW

SEQ ID NO: 3110 - protein, 9 aa, synthetic construct
SHSCDGCGQ

SEQ ID NO: 3111 - protein, 9 aa, synthetic construct
SHSSCCMTF

SEQ ID NO: 3112 - protein, 9 aa, synthetic construct
SHTFINRHT

SEQ ID NO: 3113 - protein, 9 aa, synthetic construct
SHTGVFKHY

SEQ ID NO: 3114 - protein, 9 aa, synthetic construct
SHTQMELHN

SEQ ID NO: 3115 - protein, 9 aa, synthetic construct
SIDSFMPIY

SEQ ID NO: 3116 - protein, 9 aa, synthetic construct
SIEHWCCCQ

SEQ ID NO: 3117 - protein, 9 aa, synthetic construct
SIFQIGQSP

SEQ ID NO: 3118 - protein, 9 aa, synthetic construct
SIGQAWQSP

SEQ ID NO: 3119 - protein, 9 aa, synthetic construct
SIHNAKEYR

SEQ ID NO: 3120 - protein, 9 aa, synthetic construct
SIHPKQSRY

SEQ ID NO: 3121 - protein, 9 aa, synthetic construct
SIIFLVSSG

SEQ ID NO: 3122 - protein, 9 aa, synthetic construct
SIKYEDHGQ

SEQ ID NO: 3123 - protein, 9 aa, synthetic construct
SILFNPNGR

SEQ ID NO: 3124 - protein, 9 aa, synthetic construct
SIMPMNCGS

SEQ ID NO: 3125 - protein, 9 aa, synthetic construct
SIMWRSDWT

SEQ ID NO: 3126 - protein, 9 aa, synthetic construct
SINNALTIN

SEQ ID NO: 3127 - protein, 9 aa, synthetic construct
SIQHCRDYY

SEQ ID NO: 3128 - protein, 9 aa, synthetic construct
SIQLTNQCE

SEQ ID NO: 3129 - protein, 9 aa, synthetic construct
SIQPCRDYC

SEQ ID NO: 3130 - protein, 9 aa, synthetic construct
SISHMQARA

SEQ ID NO: 3131 - protein, 9 aa, synthetic construct
SISSIEGYP

SEQ ID NO: 3132 - protein, 9 aa, synthetic construct
SIYQLSWHG

SEQ ID NO: 3133 - protein, 9 aa, synthetic construct
SKNTVGIGH

SEQ ID NO: 3134 - protein, 9 aa, synthetic construct
SLADQVHVA

SEQ ID NO: 3135 - protein, 9 aa, synthetic construct
SLDSIFACG

SEQ ID NO: 3136 - protein, 9 aa, synthetic construct
SLGMDGMGV

SEQ ID NO: 3137 - protein, 9 aa, synthetic construct
SLGNKLHIT

SEQ ID NO: 3138 - protein, 9 aa, synthetic construct
SLRSYVDSF

SEQ ID NO: 3139 - protein, 9 aa, synthetic construct
SLSEMRWAA

SEQ ID NO: 3140 - protein, 9 aa, synthetic construct
SLSQYFESF

SEQ ID NO: 3141 - protein, 9 aa, synthetic construct
SLTSSFAVL

SEQ ID NO: 3142 - protein, 9 aa, synthetic construct
SLYNRYIHF

SEQ ID NO: 3143 - protein, 9 aa, synthetic construct
SMAICMHDN

SEQ ID NO: 3144 - protein, 9 aa, synthetic construct
SMDVTHFFE

SEQ ID NO: 3145 - protein, 9 aa, synthetic construct
SMEPYIFGS

SEQ ID NO: 3146 - protein, 9 aa, synthetic construct
SMFTHQLAQ

SEQ ID NO: 3147 - protein, 9 aa, synthetic construct
SMFYVRLVC

SEQ ID NO: 3148 - protein, 9 aa, synthetic construct
SMGYSEVFG

SEQ ID NO: 3149 - protein, 9 aa, synthetic construct
SMHCSGYAL

SEQ ID NO: 3150 - protein, 9 aa, synthetic construct
SMHHWAKGP

SEQ ID NO: 3151 - protein, 9 aa, synthetic construct
SMHYYDTFE

SEQ ID NO: 3152 - protein, 9 aa, synthetic construct
SMLQTTEQC

SEQ ID NO: 3153 - protein, 9 aa, synthetic construct
SMLQTTSQM

SEQ ID NO: 3154 - protein, 9 aa, synthetic construct
SMMCRCWLM

SEQ ID NO: 3155 - protein, 9 aa, synthetic construct
SMNPNLTGD

SEQ ID NO: 3156 - protein, 9 aa, synthetic construct
SMSFYQACH

SEQ ID NO: 3157 - protein, 9 aa, synthetic construct
SMTNVPNLA

SEQ ID NO: 3158 - protein, 9 aa, synthetic construct
SMWVPPNAA

SEQ ID NO: 3159 - protein, 9 aa, synthetic construct
SMYMRVCYT

SEQ ID NO: 3160 - protein, 9 aa, synthetic construct
SMYTMCTNH

SEQ ID NO: 3161 - protein, 9 aa, synthetic construct
SMYTTEDIQ

SEQ ID NO: 3162 - protein, 9 aa, synthetic construct
SNAMMFFCS

SEQ ID NO: 3163 - protein, 9 aa, synthetic construct
SNDRVKKMD

SEQ ID NO: 3164 - protein, 9 aa, synthetic construct
SNEANISVE

SEQ ID NO: 3165 - protein, 9 aa, synthetic construct
SNMHYMRGS

SEQ ID NO: 3166 - protein, 9 aa, synthetic construct
SNMPLMNMA

SEQ ID NO: 3167 - protein, 9 aa, synthetic construct
SNSFYQTLG

SEQ ID NO: 3168 - protein, 9 aa, synthetic construct
SNSHPFQSH

SEQ ID NO: 3169 - protein, 9 aa, synthetic construct
SNSLYKKER

SEQ ID NO: 3170 - protein, 9 aa, synthetic construct
SNWAIVKCD

SEQ ID NO: 3171 - protein, 9 aa, synthetic construct
SNWQIVKTD

SEQ ID NO: 3172 - protein, 9 aa, synthetic construct
SPISVNNTL

SEQ ID NO: 3173 - protein, 9 aa, synthetic construct
SPLPMYNQE

SEQ ID NO: 3174 - protein, 9 aa, synthetic construct
SPMFYGSAH

SEQ ID NO: 3175 - protein, 9 aa, synthetic construct
SPNMFCEMQ

SEQ ID NO: 3176 - protein, 9 aa, synthetic construct
SPYQYQLAE

SEQ ID NO: 3177 - protein, 9 aa, synthetic construct
SQCVMQFPL

SEQ ID NO: 3178 - protein, 9 aa, synthetic construct
SQGAGHCGN

SEQ ID NO: 3179 - protein, 9 aa, synthetic construct
SQGPKHCGD

SEQ ID NO: 3180 - protein, 9 aa, synthetic construct
SQIDLCVDM

SEQ ID NO: 3181 - protein, 9 aa, synthetic construct
SQILEDLMG

SEQ ID NO: 3182 - protein, 9 aa, synthetic construct
SQKQFSMQH

SEQ ID NO: 3183 - protein, 9 aa, synthetic construct
SQKTICGSY

SEQ ID NO: 3184 - protein, 9 aa, synthetic construct
SQMNCYGGC

SEQ ID NO: 3185 - protein, 9 aa, synthetic construct
SQNMSVTQY

SEQ ID NO: 3186 - protein, 9 aa, synthetic construct
SQNYHSMYA

SEQ ID NO: 3187 - protein, 9 aa, synthetic construct
SQQHCQHDQ

SEQ ID NO: 3188 - protein, 9 aa, synthetic construct
SQSFYFNHD

SEQ ID NO: 3189 - protein, 9 aa, synthetic construct
SQTYVDMYA

SEQ ID NO: 3190 - protein, 9 aa, synthetic construct
SRCMSSMCY

SEQ ID NO: 3191 - protein, 9 aa, synthetic construct
SREYFATTF

SEQ ID NO: 3192 - protein, 9 aa, synthetic construct
SREYFETTF

SEQ ID NO: 3193 - protein, 9 aa, synthetic construct
SRGYRESDS

SEQ ID NO: 3194 - protein, 9 aa, synthetic construct
SRKFCEGTP

SEQ ID NO: 3195 - protein, 9 aa, synthetic construct
SRSPMMDMQ

SEQ ID NO: 3196 - protein, 9 aa, synthetic construct
SSAAIYADF

SEQ ID NO: 3197 - protein, 9 aa, synthetic construct
SSACYYAKG

SEQ ID NO: 3198 - protein, 9 aa, synthetic construct
SSASSSEIC

SEQ ID NO: 3199 - protein, 9 aa, synthetic construct
SSDCNRRCH

SEQ ID NO: 3200 - protein, 9 aa, synthetic construct
SSEWLESAE

SEQ ID NO: 3201 - protein, 9 aa, synthetic construct
SSFPEQQCH

SEQ ID NO: 3202 - protein, 9 aa, synthetic construct
SSFYVQQCP

SEQ ID NO: 3203 - protein, 9 aa, synthetic construct
SSGDSYQDY

SEQ ID NO: 3204 - protein, 9 aa, synthetic construct
SSGHYNQLI

SEQ ID NO: 3205 - protein, 9 aa, synthetic construct
SSGIMCADN

SEQ ID NO: 3206 - protein, 9 aa, synthetic construct
SSGITAQCT

SEQ ID NO: 3207 - protein, 9 aa, synthetic construct
SSHEICHDG

SEQ ID NO: 3208 - protein, 9 aa, synthetic construct
SSHQNIGQP

SEQ ID NO: 3209 - protein, 9 aa, synthetic construct
SSILMQMNC

SEQ ID NO: 3210 - protein, 9 aa, synthetic construct
SSIQMQMQC

SEQ ID NO: 3211 - protein, 9 aa, synthetic construct
SSISFQALG

SEQ ID NO: 3212 - protein, 9 aa, synthetic construct
SSLYKFNHH

SEQ ID NO: 3213 - protein, 9 aa, synthetic construct
SSMQQQLTW

SEQ ID NO: 3214 - protein, 9 aa, synthetic construct
SSQHVNGVW

SEQ ID NO: 3215 - protein, 9 aa, synthetic construct
SSQRITCEW

SEQ ID NO: 3216 - protein, 9 aa, synthetic construct
SSQWSSGMY

SEQ ID NO: 3217 - protein, 9 aa, synthetic construct
SSQYNTCEW

SEQ ID NO: 3218 - protein, 9 aa, synthetic construct
SSTGEIQYG

SEQ ID NO: 3219 - protein, 9 aa, synthetic construct
SSTGFDCEQ

SEQ ID NO: 3220 - protein, 9 aa, synthetic construct
SSTGYPRGG

SEQ ID NO: 3221 - protein, 9 aa, synthetic construct
SSTRDVCFC

SEQ ID NO: 3222 - protein, 9 aa, synthetic construct
SSTSSSEIC

SEQ ID NO: 3223 - protein, 9 aa, synthetic construct
SSVEFPWQT

SEQ ID NO: 3224 - protein, 9 aa, synthetic construct
SSVPSMQCG

SEQ ID NO: 3225 - protein, 9 aa, synthetic construct
SSYPESGWQ

SEQ ID NO: 3226 - protein, 9 aa, synthetic construct
STAACTTWC

SEQ ID NO: 3227 - protein, 9 aa, synthetic construct
STAHIIPDN

SEQ ID NO: 3228 - protein, 9 aa, synthetic construct
STCHQWDAG

SEQ ID NO: 3229 - protein, 9 aa, synthetic construct
STDDRMDAA

SEQ ID NO: 3230 - protein, 9 aa, synthetic construct
STEQCGEWY

SEQ ID NO: 3231 - protein, 9 aa, synthetic construct
STEVRWTGA

SEQ ID NO: 3232 - protein, 9 aa, synthetic construct
STGWSAIAN

SEQ ID NO: 3233 - protein, 9 aa, synthetic construct
STHQPCAQN

SEQ ID NO: 3234 - protein, 9 aa, synthetic construct
STLQNIQTH

SEQ ID NO: 3235 - protein, 9 aa, synthetic construct
STLTPVKLE

SEQ ID NO: 3236 - protein, 9 aa, synthetic construct
STMQVIDIS

SEQ ID NO: 3237 - protein, 9 aa, synthetic construct
STNEVWASM

SEQ ID NO: 3238 - protein, 9 aa, synthetic construct
STNHVDDPL

SEQ ID NO: 3239 - protein, 9 aa, synthetic construct
STQNNDMYC

SEQ ID NO: 3240 - protein, 9 aa, synthetic construct
STRLIEQFG

SEQ ID NO: 3241 - protein, 9 aa, synthetic construct
STRVMEQFG

SEQ ID NO: 3242 - protein, 9 aa, synthetic construct
STSPYHRQN

SEQ ID NO: 3243 - protein, 9 aa, synthetic construct
STTHRDNYE

SEQ ID NO: 3244 - protein, 9 aa, synthetic construct
STTPQMHVS

SEQ ID NO: 3245 - protein, 9 aa, synthetic construct
STTRFNFWN

SEQ ID NO: 3246 - protein, 9 aa, synthetic construct
STWMSWEAI

SEQ ID NO: 3247 - protein, 9 aa, synthetic construct
SVADQVQVA

SEQ ID NO: 3248 - protein, 9 aa, synthetic construct
SVAQRPEMI

SEQ ID NO: 3249 - protein, 9 aa, synthetic construct
SVAQRSEMF

SEQ ID NO: 3250 - protein, 9 aa, synthetic construct
SVCQTTQHQ

SEQ ID NO: 3251 - protein, 9 aa, synthetic construct
SVDLGTMEQ

SEQ ID NO: 3252 - protein, 9 aa, synthetic construct
SVEQMRKIP

SEQ ID NO: 3253 - protein, 9 aa, synthetic construct
SVHMLDDFM

SEQ ID NO: 3254 - protein, 9 aa, synthetic construct
SVIPKHKNS

SEQ ID NO: 3255 - protein, 9 aa, synthetic construct
SVIQTEHFD

SEQ ID NO: 3256 - protein, 9 aa, synthetic construct
SVLCLSMGG

SEQ ID NO: 3257 - protein, 9 aa, synthetic construct
SVNTMWYPD

SEQ ID NO: 3258 - protein, 9 aa, synthetic construct
SVRMFDAQY

SEQ ID NO: 3259 - protein, 9 aa, synthetic construct
SVRVQTWIG

SEQ ID NO: 3260 - protein, 9 aa, synthetic construct
SVSPCFCNS

SEQ ID NO: 3261 - protein, 9 aa, synthetic construct
SVSYESTIF

SEQ ID NO: 3262 - protein, 9 aa, synthetic construct
SVTHDLHSF

SEQ ID NO: 3263 - protein, 9 aa, synthetic construct
SVVFSAAEV

SEQ ID NO: 3264 - protein, 9 aa, synthetic construct
SVVVVQTGK

SEQ ID NO: 3265 - protein, 9 aa, synthetic construct
SVYMMTEGW

SEQ ID NO: 3266 - protein, 9 aa, synthetic construct
SWAMISTCS

SEQ ID NO: 3267 - protein, 9 aa, synthetic construct
SWDHLFTDQ

SEQ ID NO: 3268 - protein, 9 aa, synthetic construct
SWISKGHCE

SEQ ID NO: 3269 - protein, 9 aa, synthetic construct
SWLFSQDLK

SEQ ID NO: 3270 - protein, 9 aa, synthetic construct
SWMWITNPN

SEQ ID NO: 3271 - protein, 9 aa, synthetic construct
SWQSFILCE

SEQ ID NO: 3272 - protein, 9 aa, synthetic construct
SWSERCSFE

SEQ ID NO: 3273 - protein, 9 aa, synthetic construct
SWVKQDTMA

SEQ ID NO: 3274 - protein, 9 aa, synthetic construct
SWVMLLPIH

SEQ ID NO: 3275 - protein, 9 aa, synthetic construct
SYCHIMGVQ

SEQ ID NO: 3276 - protein, 9 aa, synthetic construct
SYDAEQRNG

SEQ ID NO: 3277 - protein, 9 aa, synthetic construct
SYESFRSMH

SEQ ID NO: 3278 - protein, 9 aa, synthetic construct
SYGVIMTEE

SEQ ID NO: 3279 - protein, 9 aa, synthetic construct
SYNPWNQHA

SEQ ID NO: 3280 - protein, 9 aa, synthetic construct
SYQFAQYWL

SEQ ID NO: 3281 - protein, 9 aa, synthetic construct
SYQRWDSCD

SEQ ID NO: 3282 - protein, 9 aa, synthetic construct
SYSPCFCRS

SEQ ID NO: 3283 - protein, 9 aa, synthetic construct
TAAFAYKYE

SEQ ID NO: 3284 - protein, 9 aa, synthetic construct
TAALFEGSK

SEQ ID NO: 3285 - protein, 9 aa, synthetic construct
TAAQKFMAN

SEQ ID NO: 3286 - protein, 9 aa, synthetic construct
TAAYGDRYD

SEQ ID NO: 3287 - protein, 9 aa, synthetic construct
TACDFISLT

SEQ ID NO: 3288 - protein, 9 aa, synthetic construct
TADEFSCCQ

SEQ ID NO: 3289 - protein, 9 aa, synthetic construct
TADTRVNHY

SEQ ID NO: 3290 - protein, 9 aa, synthetic construct
TAEAFQKFI

SEQ ID NO: 3291 - protein, 9 aa, synthetic construct
TAENIQTHN

SEQ ID NO: 3292 - protein, 9 aa, synthetic construct
TAEVRWPCP

SEQ ID NO: 3293 - protein, 9 aa, synthetic construct
TAFECMICG

SEQ ID NO: 3294 - protein, 9 aa, synthetic construct
TAFECMIDG

SEQ ID NO: 3295 - protein, 9 aa, synthetic construct
TAFNAQCGQ

SEQ ID NO: 3296 - protein, 9 aa, synthetic construct
TAGGSDAEK

SEQ ID NO: 3297 - protein, 9 aa, synthetic construct
TAGRFNYFD

SEQ ID NO: 3298 - protein, 9 aa, synthetic construct
TAHLETDQN

SEQ ID NO: 3299 - protein, 9 aa, synthetic construct
TAHLHMGNI

SEQ ID NO: 3300 - protein, 9 aa, synthetic construct
TAIPMNELV

SEQ ID NO: 3301 - protein, 9 aa, synthetic construct
TAITGFNIH

SEQ ID NO: 3302 - protein, 9 aa, synthetic construct
TAKAQNAFE

SEQ ID NO: 3303 - protein, 9 aa, synthetic construct
TAMASMWLS

SEQ ID NO: 3304 - protein, 9 aa, synthetic construct
TAMHSAYHS

SEQ ID NO: 3305 - protein, 9 aa, synthetic construct
TANKCDCSD

SEQ ID NO: 3306 - protein, 9 aa, synthetic construct
TANVYRSGQ

SEQ ID NO: 3307 - protein, 9 aa, synthetic construct
TASHCSFNQ

SEQ ID NO: 3308 - protein, 9 aa, synthetic construct
TASMLMMTP

SEQ ID NO: 3309 - protein, 9 aa, synthetic construct
TASNGCINS

SEQ ID NO: 3310 - protein, 9 aa, synthetic construct
TASPMVEHW

SEQ ID NO: 3311 - protein, 9 aa, synthetic construct
TATFSDFGF

SEQ ID NO: 3312 - protein, 9 aa, synthetic construct
TATLSMWLS

SEQ ID NO: 3313 - protein, 9 aa, synthetic construct
TAVEKNTLW

SEQ ID NO: 3314 - protein, 9 aa, synthetic construct
TAVKLEQGS

SEQ ID NO: 3315 - protein, 9 aa, synthetic construct
TAVNYWNTS

SEQ ID NO: 3316 - protein, 9 aa, synthetic construct
TAYAFDCNC

SEQ ID NO: 3317 - protein, 9 aa, synthetic construct
TCAPSSSMD

SEQ ID NO: 3318 - protein, 9 aa, synthetic construct
TCCMWTFIW

SEQ ID NO: 3319 - protein, 9 aa, synthetic construct
TCCSFSFYS

SEQ ID NO: 3320 - protein, 9 aa, synthetic construct
TCCTVERES

SEQ ID NO: 3321 - protein, 9 aa, synthetic construct
TCDHASDIE

SEQ ID NO: 3322 - protein, 9 aa, synthetic construct
TCDYNVDTT

SEQ ID NO: 3323 - protein, 9 aa, synthetic construct
TCEAAQAQH

SEQ ID NO: 3324 - protein, 9 aa, synthetic construct
TCGKAMEQY

SEQ ID NO: 3325 - protein, 9 aa, synthetic construct
TCGLWKNLV

SEQ ID NO: 3326 - protein, 9 aa, synthetic construct
TCGTTVRCG

SEQ ID NO: 3327 - protein, 9 aa, synthetic construct
TCIHVAGVP

SEQ ID NO: 3328 - protein, 9 aa, synthetic construct
TCISNHHTC

SEQ ID NO: 3329 - protein, 9 aa, synthetic construct
TCLPNPMQL

SEQ ID NO: 3330 - protein, 9 aa, synthetic construct
TCQQMGDIG

SEQ ID NO: 3331 - protein, 9 aa, synthetic construct
TCQYEMVCD

SEQ ID NO: 3332 - protein, 9 aa, synthetic construct
TCQYVMLCD

SEQ ID NO: 3333 - protein, 9 aa, synthetic construct
TCTSGGSWL

SEQ ID NO: 3334 - protein, 9 aa, synthetic construct
TCVEFMQWN

SEQ ID NO: 3335 - protein, 9 aa, synthetic construct
TCVFTDHQC

SEQ ID NO: 3336 - protein, 9 aa, synthetic construct
TCYFFGEQE

SEQ ID NO: 3337 - protein, 9 aa, synthetic construct
TDAGMFAHD

SEQ ID NO: 3338 - protein, 9 aa, synthetic construct
TDDPIHNFE

SEQ ID NO: 3339 - protein, 9 aa, synthetic construct
TDEQCKFGH

SEQ ID NO: 3340 - protein, 9 aa, synthetic construct
TEGPMHRAW

SEQ ID NO: 3341 - protein, 9 aa, synthetic construct
TELSYDAFL

SEQ ID NO: 3342 - protein, 9 aa, synthetic construct
TEQFCGIML

SEQ ID NO: 3343 - protein, 9 aa, synthetic construct
TESMVMYER

SEQ ID NO: 3344 - protein, 9 aa, synthetic construct
TFCCMDMIN

SEQ ID NO: 3345 - protein, 9 aa, synthetic construct
TFDLMQAIR

SEQ ID NO: 3346 - protein, 9 aa, synthetic construct
TFDPFTTSQ

SEQ ID NO: 3347 - protein, 9 aa, synthetic construct
TFEPCQSGV

SEQ ID NO: 3348 - protein, 9 aa, synthetic construct
TFHQSIVGE

SEQ ID NO: 3349 - protein, 9 aa, synthetic construct
TFISLQQSS

SEQ ID NO: 3350 - protein, 9 aa, synthetic construct
TFLMLVDDQ

SEQ ID NO: 3351 - protein, 9 aa, synthetic construct
TFNIAYVQS

SEQ ID NO: 3352 - protein, 9 aa, synthetic construct
TFSQEGVSI

SEQ ID NO: 3353 - protein, 9 aa, synthetic construct
TFVIVDDQN

SEQ ID NO: 3354 - protein, 9 aa, synthetic construct
TFWSSSNYE

SEQ ID NO: 3355 - protein, 9 aa, synthetic construct
TGGMYYVQN

SEQ ID NO: 3356 - protein, 9 aa, synthetic construct
TGKWLVYQA

SEQ ID NO: 3357 - protein, 9 aa, synthetic construct
TGLFIRTMK

SEQ ID NO: 3358 - protein, 9 aa, synthetic construct
TGLLIPNGK

SEQ ID NO: 3359 - protein, 9 aa, synthetic construct
TGNDHHEVI

SEQ ID NO: 3360 - protein, 9 aa, synthetic construct
TGNYVHSNQ

SEQ ID NO: 3361 - protein, 9 aa, synthetic construct
TGRIKDAGP

SEQ ID NO: 3362 - protein, 9 aa, synthetic construct
THAQIGTFD

SEQ ID NO: 3363 - protein, 9 aa, synthetic construct
THAVTGILY

SEQ ID NO: 3364 - protein, 9 aa, synthetic construct
THECYQMWH

SEQ ID NO: 3365 - protein, 9 aa, synthetic construct
THEMVNENG

SEQ ID NO: 3366 - protein, 9 aa, synthetic construct
THGYMQSHN

SEQ ID NO: 3367 - protein, 9 aa, synthetic construct
THMNVVRSF

SEQ ID NO: 3368 - protein, 9 aa, synthetic construct
THNTVPVER

SEQ ID NO: 3369 - protein, 9 aa, synthetic construct
THQNTWLFY

SEQ ID NO: 3370 - protein, 9 aa, synthetic construct
THRHSDMGF

SEQ ID NO: 3371 - protein, 9 aa, synthetic construct
THTQYWAMQ

SEQ ID NO: 3372 - protein, 9 aa, synthetic construct
TIAVIGSAA

SEQ ID NO: 3373 - protein, 9 aa, synthetic construct
TICKTEIGH

SEQ ID NO: 3374 - protein, 9 aa, synthetic construct
TICNCMFGA

SEQ ID NO: 3375 - protein, 9 aa, synthetic construct
TICQTEFGH

SEQ ID NO: 3376 - protein, 9 aa, synthetic construct
TIDGMMGDH

SEQ ID NO: 3377 - protein, 9 aa, synthetic construct
TIEAKWECM

SEQ ID NO: 3378 - protein, 9 aa, synthetic construct
TIEANWEYQ

SEQ ID NO: 3379 - protein, 9 aa, synthetic construct
TIECEQRET

SEQ ID NO: 3380 - protein, 9 aa, synthetic construct
TIEPGCQCT

SEQ ID NO: 3381 - protein, 9 aa, synthetic construct
TIEWKLHMG

SEQ ID NO: 3382 - protein, 9 aa, synthetic construct
TIFYYGGNI

SEQ ID NO: 3383 - protein, 9 aa, synthetic construct
TIGEMVNPS

SEQ ID NO: 3384 - protein, 9 aa, synthetic construct
TIHQSQFIC

SEQ ID NO: 3385 - protein, 9 aa, synthetic construct
TIHSSVSAS

SEQ ID NO: 3386 - protein, 9 aa, synthetic construct
TILCDQQQA

SEQ ID NO: 3387 - protein, 9 aa, synthetic construct
TIMNWNDAK

SEQ ID NO: 3388 - protein, 9 aa, synthetic construct
TIMSDGHTH

SEQ ID NO: 3389 - protein, 9 aa, synthetic construct
TINLTTQSV

SEQ ID NO: 3390 - protein, 9 aa, synthetic construct
TIRLTEQSV

SEQ ID NO: 3391 - protein, 9 aa, synthetic construct
TISELQSEF

SEQ ID NO: 3392 - protein, 9 aa, synthetic construct
TISIFTNCR

SEQ ID NO: 3393 - protein, 9 aa, synthetic construct
TISLEYCTF

SEQ ID NO: 3394 - protein, 9 aa, synthetic construct
TISWLGGCH

SEQ ID NO: 3395 - protein, 9 aa, synthetic construct
TIVNMQMGN

SEQ ID NO: 3396 - protein, 9 aa, synthetic construct
TIVWMCVNW

SEQ ID NO: 3397 - protein, 9 aa, synthetic construct
TKEPCTVGV

SEQ ID NO: 3398 - protein, 9 aa, synthetic construct
TKEPTTVGF

SEQ ID NO: 3399 - protein, 9 aa, synthetic construct
TKFHMMIQT

SEQ ID NO: 3400 - protein, 9 aa, synthetic construct
TKNCVASTF

SEQ ID NO: 3401 - protein, 9 aa, synthetic construct
TKQFELKDE

SEQ ID NO: 3402 - protein, 9 aa, synthetic construct
TKQFETKSE

SEQ ID NO: 3403 - protein, 9 aa, synthetic construct
TKQHYDSPA

SEQ ID NO: 3404 - protein, 9 aa, synthetic construct
TLCGLDSEY

SEQ ID NO: 3405 - protein, 9 aa, synthetic construct
TLCGNTQCP

SEQ ID NO: 3406 - protein, 9 aa, synthetic construct
TLEGSDSEY

SEQ ID NO: 3407 - protein, 9 aa, synthetic construct
TLNNLHRVA

SEQ ID NO: 3408 - protein, 9 aa, synthetic construct
TLPLFWRLK

SEQ ID NO: 3409 - protein, 9 aa, synthetic construct
TLQMVMNKG

SEQ ID NO: 3410 - protein, 9 aa, synthetic construct
TLRDSECYS

SEQ ID NO: 3411 - protein, 9 aa, synthetic construct
TLTYYEEGE

SEQ ID NO: 3412 - protein, 9 aa, synthetic construct
TLVPCQTCE

SEQ ID NO: 3413 - protein, 9 aa, synthetic construct
TLVRGMHQI

SEQ ID NO: 3414 - protein, 9 aa, synthetic construct
TLVRSDYDP

SEQ ID NO: 3415 - protein, 9 aa, synthetic construct
TLVRSDYYP

SEQ ID NO: 3416 - protein, 9 aa, synthetic construct
TLYMHEKLG

SEQ ID NO: 3417 - protein, 9 aa, synthetic construct
TMANLCWRT

SEQ ID NO: 3418 - protein, 9 aa, synthetic construct
TMCPHGIRC

SEQ ID NO: 3419 - protein, 9 aa, synthetic construct
TMCPKMWQH

SEQ ID NO: 3420 - protein, 9 aa, synthetic construct
TMDQGHCMI

SEQ ID NO: 3421 - protein, 9 aa, synthetic construct
TMIHHQNAD

SEQ ID NO: 3422 - protein, 9 aa, synthetic construct
TMLHSQNME

SEQ ID NO: 3423 - protein, 9 aa, synthetic construct
TMMCDQQQA

SEQ ID NO: 3424 - protein, 9 aa, synthetic construct
TMPPFPCHM

SEQ ID NO: 3425 - protein, 9 aa, synthetic construct
TMPYSQWAM

SEQ ID NO: 3426 - protein, 9 aa, synthetic construct
TMSDRQQDT

SEQ ID NO: 3427 - protein, 9 aa, synthetic construct
TMSGYCCSF

SEQ ID NO: 3428 - protein, 9 aa, synthetic construct
TMSVHYGQG

SEQ ID NO: 3429 - protein, 9 aa, synthetic construct
TMTSTLQST

SEQ ID NO: 3430 - protein, 9 aa, synthetic construct
TMVAGKMRC

SEQ ID NO: 3431 - protein, 9 aa, synthetic construct
TMWEDNQNM

SEQ ID NO: 3432 - protein, 9 aa, synthetic construct
TMYFNANTQ

SEQ ID NO: 3433 - protein, 9 aa, synthetic construct
TMYTKTSMF

SEQ ID NO: 3434 - protein, 9 aa, synthetic construct
TNEGVLHHT

SEQ ID NO: 3435 - protein, 9 aa, synthetic construct
TNHELAEKP

SEQ ID NO: 3436 - protein, 9 aa, synthetic construct
TNHELAMYP

SEQ ID NO: 3437 - protein, 9 aa, synthetic construct
TNHPKCKKD

SEQ ID NO: 3438 - protein, 9 aa, synthetic construct
TNIQKAMGA

SEQ ID NO: 3439 - protein, 9 aa, synthetic construct
TNKTLPATF

SEQ ID NO: 3440 - protein, 9 aa, synthetic construct
TNLVYQFLE

SEQ ID NO: 3441 - protein, 9 aa, synthetic construct
TNQSQNCMF

SEQ ID NO: 3442 - protein, 9 aa, synthetic construct
TPAMEISMF

SEQ ID NO: 3443 - protein, 9 aa, synthetic construct
TPCISHCEP

SEQ ID NO: 3444 - protein, 9 aa, synthetic construct
TPEEFTMSP

SEQ ID NO: 3445 - protein, 9 aa, synthetic construct
TPGTLQGHH

SEQ ID NO: 3446 - protein, 9 aa, synthetic construct
TPLMMCQAS

SEQ ID NO: 3447 - protein, 9 aa, synthetic construct
TPNSFNCAS

SEQ ID NO: 3448 - protein, 9 aa, synthetic construct
TPTLESNCR

SEQ ID NO: 3449 - protein, 9 aa, synthetic construct
TQAECITVP

SEQ ID NO: 3450 - protein, 9 aa, synthetic construct
TQCHDMWGH

SEQ ID NO: 3451 - protein, 9 aa, synthetic construct
TQDFCSVCD

SEQ ID NO: 3452 - protein, 9 aa, synthetic construct
TQECYYDQF

SEQ ID NO: 3453 - protein, 9 aa, synthetic construct
TQEPIHHQN

SEQ ID NO: 3454 - protein, 9 aa, synthetic construct
TQFPVEYMS

SEQ ID NO: 3455 - protein, 9 aa, synthetic construct
TQGFYNVGV

SEQ ID NO: 3456 - protein, 9 aa, synthetic construct
TQQNCMTGN

SEQ ID NO: 3457 - protein, 9 aa, synthetic construct
TQSGYHFWC

SEQ ID NO: 3458 - protein, 9 aa, synthetic construct
TQTILNCGY

SEQ ID NO: 3459 - protein, 9 aa, synthetic construct
TQVLMEMCT

SEQ ID NO: 3460 - protein, 9 aa, synthetic construct
TQWTEKRQA

SEQ ID NO: 3461 - protein, 9 aa, synthetic construct
TRCFIDQGI

SEQ ID NO: 3462 - protein, 9 aa, synthetic construct
TRIEQEWNH

SEQ ID NO: 3463 - protein, 9 aa, synthetic construct
TSDASVQQS

SEQ ID NO: 3464 - protein, 9 aa, synthetic construct
TSDMTMENQ

SEQ ID NO: 3465 - protein, 9 aa, synthetic construct
TSDWWCQKC

SEQ ID NO: 3466 - protein, 9 aa, synthetic construct
TSEGGIIYN

SEQ ID NO: 3467 - protein, 9 aa, synthetic construct
TSFGISWLH

SEQ ID NO: 3468 - protein, 9 aa, synthetic construct
TSFNMICNS

SEQ ID NO: 3469 - protein, 9 aa, synthetic construct
TSGQPGISW

SEQ ID NO: 3470 - protein, 9 aa, synthetic construct
TSHINIWGQ

SEQ ID NO: 3471 - protein, 9 aa, synthetic construct
TSHWSAVQM

SEQ ID NO: 3472 - protein, 9 aa, synthetic construct
TSHYITFTP

SEQ ID NO: 3473 - protein, 9 aa, synthetic construct
TSLGQWTHF

SEQ ID NO: 3474 - protein, 9 aa, synthetic construct
TSLHSSMGH

SEQ ID NO: 3475 - protein, 9 aa, synthetic construct
TSLHYQFFA

SEQ ID NO: 3476 - protein, 9 aa, synthetic construct
TSMSFDSTH

SEQ ID NO: 3477 - protein, 9 aa, synthetic construct
TSNFEPFSP

SEQ ID NO: 3478 - protein, 9 aa, synthetic construct
TSQCAHQWS

SEQ ID NO: 3479 - protein, 9 aa, synthetic construct
TSQRNIEAG

SEQ ID NO: 3480 - protein, 9 aa, synthetic construct
TSQRNIEVA

SEQ ID NO: 3481 - protein, 9 aa, synthetic construct
TSQWLMNMQ

SEQ ID NO: 3482 - protein, 9 aa, synthetic construct
TSSFMDCVD

SEQ ID NO: 3483 - protein, 9 aa, synthetic construct
TSTIEELAQ

SEQ ID NO: 3484 - protein, 9 aa, synthetic construct
TSTMAGPCI

SEQ ID NO: 3485 - protein, 9 aa, synthetic construct
TSTQRQDVF

SEQ ID NO: 3486 - protein, 9 aa, synthetic construct
TSTRLYPVD

SEQ ID NO: 3487 - protein, 9 aa, synthetic construct
TSVMCNQTR

SEQ ID NO: 3488 - protein, 9 aa, synthetic construct
TSVTIQFWE

SEQ ID NO: 3489 - protein, 9 aa, synthetic construct
TSVWWCKKE

SEQ ID NO: 3490 - protein, 9 aa, synthetic construct
TSVWWCQKE

SEQ ID NO: 3491 - protein, 9 aa, synthetic construct
TSWIQTWGS

SEQ ID NO: 3492 - protein, 9 aa, synthetic construct
TTAIRDLTM

SEQ ID NO: 3493 - protein, 9 aa, synthetic construct
TTEKYWEHR

SEQ ID NO: 3494 - protein, 9 aa, synthetic construct
TTFIIPIPS

SEQ ID NO: 3495 - protein, 9 aa, synthetic construct
TTFRNINPA

SEQ ID NO: 3496 - protein, 9 aa, synthetic construct
TTGPNPNCY

SEQ ID NO: 3497 - protein, 9 aa, synthetic construct
TTGWRYQTS

SEQ ID NO: 3498 - protein, 9 aa, synthetic construct
TTHQLAVVY

SEQ ID NO: 3499 - protein, 9 aa, synthetic construct
TTKTCAEGG

SEQ ID NO: 3500 - protein, 9 aa, synthetic construct
TTLAHILSL

SEQ ID NO: 3501 - protein, 9 aa, synthetic construct
TTNGYMSMD

SEQ ID NO: 3502 - protein, 9 aa, synthetic construct
TTNLPQPEM

SEQ ID NO: 3503 - protein, 9 aa, synthetic construct
TTNQWMNYY

SEQ ID NO: 3504 - protein, 9 aa, synthetic construct
TTQFCGSML

SEQ ID NO: 3505 - protein, 9 aa, synthetic construct
TTSTSIIYH

SEQ ID NO: 3506 - protein, 9 aa, synthetic construct
TTTGINYHH

SEQ ID NO: 3507 - protein, 9 aa, synthetic construct
TTTIYQQQP

SEQ ID NO: 3508 - protein, 9 aa, synthetic construct
TTVDNGFHS

SEQ ID NO: 3509 - protein, 9 aa, synthetic construct
TTYQSGWHG

SEQ ID NO: 3510 - protein, 9 aa, synthetic construct
TTYYCPTSQ

SEQ ID NO: 3511 - protein, 9 aa, synthetic construct
TVAPHWIDH

SEQ ID NO: 3512 - protein, 9 aa, synthetic construct
TVAPSNCAN

SEQ ID NO: 3513 - protein, 9 aa, synthetic construct
TVDMLHMAS

SEQ ID NO: 3514 - protein, 9 aa, synthetic construct
TVDQFDKYN

SEQ ID NO: 3515 - protein, 9 aa, synthetic construct
TVDQYCVRA

SEQ ID NO: 3516 - protein, 9 aa, synthetic construct
TVDSEVNAD

SEQ ID NO: 3517 - protein, 9 aa, synthetic construct
TVENMPTYP

SEQ ID NO: 3518 - protein, 9 aa, synthetic construct
TVENNYGGY

SEQ ID NO: 3519 - protein, 9 aa, synthetic construct
TVKMIHVDW

SEQ ID NO: 3520 - protein, 9 aa, synthetic construct
TVMHDHCDN

SEQ ID NO: 3521 - protein, 9 aa, synthetic construct
TVMLESNCR

SEQ ID NO: 3522 - protein, 9 aa, synthetic construct
TVNAESKGC

SEQ ID NO: 3523 - protein, 9 aa, synthetic construct
TVNHWQQIC

SEQ ID NO: 3524 - protein, 9 aa, synthetic construct
TVNLCDIYK

SEQ ID NO: 3525 - protein, 9 aa, synthetic construct
TVNQSVADM

SEQ ID NO: 3526 - protein, 9 aa, synthetic construct
TVQQDGAQM

SEQ ID NO: 3527 - protein, 9 aa, synthetic construct
TVQQDGHQM

SEQ ID NO: 3528 - protein, 9 aa, synthetic construct
TVTHMSQHC

SEQ ID NO: 3529 - protein, 9 aa, synthetic construct
TVYKNEQVA

SEQ ID NO: 3530 - protein, 9 aa, synthetic construct
TWAPSMYWM

SEQ ID NO: 3531 - protein, 9 aa, synthetic construct
TWCQIQGMG

SEQ ID NO: 3532 - protein, 9 aa, synthetic construct
TWDSCQDFY

SEQ ID NO: 3533 - protein, 9 aa, synthetic construct
TWDSYIQRD

SEQ ID NO: 3534 - protein, 9 aa, synthetic construct
TWEHCQYFE

SEQ ID NO: 3535 - protein, 9 aa, synthetic construct
TWHETDDFI

SEQ ID NO: 3536 - protein, 9 aa, synthetic construct
TWIEQEWNH

SEQ ID NO: 3537 - protein, 9 aa, synthetic construct
TWIQEGHYG

SEQ ID NO: 3538 - protein, 9 aa, synthetic construct
TWIQHMGTF

SEQ ID NO: 3539 - protein, 9 aa, synthetic construct
TWISSQHCH

SEQ ID NO: 3540 - protein, 9 aa, synthetic construct
TWMHMMSYR

SEQ ID NO: 3541 - protein, 9 aa, synthetic construct
TWNCAGLLP

SEQ ID NO: 3542 - protein, 9 aa, synthetic construct
TWNMIGQLP

SEQ ID NO: 3543 - protein, 9 aa, synthetic construct
TWQFYQHGC

SEQ ID NO: 3544 - protein, 9 aa, synthetic construct
TWSFMGCVD

SEQ ID NO: 3545 - protein, 9 aa, synthetic construct
TWSHCSYFE

SEQ ID NO: 3546 - protein, 9 aa, synthetic construct
TWSNYQWYQ

SEQ ID NO: 3547 - protein, 9 aa, synthetic construct
TWTEQEWNH

SEQ ID NO: 3548 - protein, 9 aa, synthetic construct
TWVTTMAMQ

SEQ ID NO: 3549 - protein, 9 aa, synthetic construct
TWYQIEGAA

SEQ ID NO: 3550 - protein, 9 aa, synthetic construct
TWYQKTGAA

SEQ ID NO: 3551 - protein, 9 aa, synthetic construct
TWYTKRTEG

SEQ ID NO: 3552 - protein, 9 aa, synthetic construct
TYDNEMSET

SEQ ID NO: 3553 - protein, 9 aa, synthetic construct
TYDQMQTEF

SEQ ID NO: 3554 - protein, 9 aa, synthetic construct
TYEQSQVLR

SEQ ID NO: 3555 - protein, 9 aa, synthetic construct
TYEWYMGDW

SEQ ID NO: 3556 - protein, 9 aa, synthetic construct
TYFLLHASG

SEQ ID NO: 3557 - protein, 9 aa, synthetic construct
TYGKAMEQY

SEQ ID NO: 3558 - protein, 9 aa, synthetic construct
TYGQWMEKA

SEQ ID NO: 3559 - protein, 9 aa, synthetic construct
TYISNQQSS

SEQ ID NO: 3560 - protein, 9 aa, synthetic construct
TYKTHTIGG

SEQ ID NO: 3561 - protein, 9 aa, synthetic construct
TYLFSNQSR

SEQ ID NO: 3562 - protein, 9 aa, synthetic construct
TYLYRKTVY

SEQ ID NO: 3563 - protein, 9 aa, synthetic construct
TYPLAWLKQ

SEQ ID NO: 3564 - protein, 9 aa, synthetic construct
TYSPMSGIE

SEQ ID NO: 3565 - protein, 9 aa, synthetic construct
TYSPMSGIV

SEQ ID NO: 3566 - protein, 9 aa, synthetic construct
TYSPMSGKA

SEQ ID NO: 3567 - protein, 9 aa, synthetic construct
TYSPMSGKD

SEQ ID NO: 3568 - protein, 9 aa, synthetic construct
TYSQMQTFF

SEQ ID NO: 3569 - protein, 9 aa, synthetic construct
TYSSKYQGD

SEQ ID NO: 3570 - protein, 9 aa, synthetic construct
TYSSWYQGE

SEQ ID NO: 3571 - protein, 9 aa, synthetic construct
TYVKFLVHP

SEQ ID NO: 3572 - protein, 9 aa, synthetic construct
TYVYNHKAF

SEQ ID NO: 3573 - protein, 9 aa, synthetic construct
VAANTYCYG

SEQ ID NO: 3574 - protein, 9 aa, synthetic construct
VADSSWNQP

SEQ ID NO: 3575 - protein, 9 aa, synthetic construct
VADYTACPM

SEQ ID NO: 3576 - protein, 9 aa, synthetic construct
VAGNATPSL

SEQ ID NO: 3577 - protein, 9 aa, synthetic construct
VAGPMWVQT

SEQ ID NO: 3578 - protein, 9 aa, synthetic construct
VAHCHVATE

SEQ ID NO: 3579 - protein, 9 aa, synthetic construct
VAHPDMKYI

SEQ ID NO: 3580 - protein, 9 aa, synthetic construct
VAILGLNPT

SEQ ID NO: 3581 - protein, 9 aa, synthetic construct
VAIPVDYHT

SEQ ID NO: 3582 - protein, 9 aa, synthetic construct
VAIYKTECI

SEQ ID NO: 3583 - protein, 9 aa, synthetic construct
VAIYPGIIE

SEQ ID NO: 3584 - protein, 9 aa, synthetic construct
VALIIDEWT

SEQ ID NO: 3585 - protein, 9 aa, synthetic construct
VALSRNSIG

SEQ ID NO: 3586 - protein, 9 aa, synthetic construct
VANLDYDPS

SEQ ID NO: 3587 - protein, 9 aa, synthetic construct
VANPINRTA

SEQ ID NO: 3588 - protein, 9 aa, synthetic construct
VANQNYAIC

SEQ ID NO: 3589 - protein, 9 aa, synthetic construct
VAQSIQEVA

SEQ ID NO: 3590 - protein, 9 aa, synthetic construct
VARPTMEEM

SEQ ID NO: 3591 - protein, 9 aa, synthetic construct
VATALMMSL

SEQ ID NO: 3592 - protein, 9 aa, synthetic construct
VATHIQVMH

SEQ ID NO: 3593 - protein, 9 aa, synthetic construct
VAVVAEHCA

SEQ ID NO: 3594 - protein, 9 aa, synthetic construct
VAYAFQCNC

SEQ ID NO: 3595 - protein, 9 aa, synthetic construct
VAYLIQDAL

SEQ ID NO: 3596 - protein, 9 aa, synthetic construct
VCEQWNEHL

SEQ ID NO: 3597 - protein, 9 aa, synthetic construct
VCETIPIKE

SEQ ID NO: 3598 - protein, 9 aa, synthetic construct
VCMLHVNCE

SEQ ID NO: 3599 - protein, 9 aa, synthetic construct
VCMLHVNFE

SEQ ID NO: 3600 - protein, 9 aa, synthetic construct
VCQRILELR

SEQ ID NO: 3601 - protein, 9 aa, synthetic construct
VCRQMNDER

SEQ ID NO: 3602 - protein, 9 aa, synthetic construct
VCTLIQDAH

SEQ ID NO: 3603 - protein, 9 aa, synthetic construct
VCTPIIDCS

SEQ ID NO: 3604 - protein, 9 aa, synthetic construct
VCVPIIHET

SEQ ID NO: 3605 - protein, 9 aa, synthetic construct
VCYNADVPG

SEQ ID NO: 3606 - protein, 9 aa, synthetic construct
VDAWDNTAC

SEQ ID NO: 3607 - protein, 9 aa, synthetic construct
VDTHMNQKQ

SEQ ID NO: 3608 - protein, 9 aa, synthetic construct
VDTLNQDAH

SEQ ID NO: 3609 - protein, 9 aa, synthetic construct
VDTVWMLPG

SEQ ID NO: 3610 - protein, 9 aa, synthetic construct
VEMQANKGL

SEQ ID NO: 3611 - protein, 9 aa, synthetic construct
VESPVLTMG

SEQ ID NO: 3612 - protein, 9 aa, synthetic construct
VESPVYNMG

SEQ ID NO: 3613 - protein, 9 aa, synthetic construct
VFEGGFPYI

SEQ ID NO: 3614 - protein, 9 aa, synthetic construct
VFFSVYQDK

SEQ ID NO: 3615 - protein, 9 aa, synthetic construct
VFGIMPCGF

SEQ ID NO: 3616 - protein, 9 aa, synthetic construct
VFGIMPCWQ

SEQ ID NO: 3617 - protein, 9 aa, synthetic construct
VFHSMYNSM

SEQ ID NO: 3618 - protein, 9 aa, synthetic construct
VFNKAIEWK

SEQ ID NO: 3619 - protein, 9 aa, synthetic construct
VFNLAQNWH

SEQ ID NO: 3620 - protein, 9 aa, synthetic construct
VFNPYIDVG

SEQ ID NO: 3621 - protein, 9 aa, synthetic construct
VFNTFDESM

SEQ ID NO: 3622 - protein, 9 aa, synthetic construct
VFNTFDQQM

SEQ ID NO: 3623 - protein, 9 aa, synthetic construct
VFRSASNKH

SEQ ID NO: 3624 - protein, 9 aa, synthetic construct
VFRSVDVVD

SEQ ID NO: 3625 - protein, 9 aa, synthetic construct
VFRVKCAAD

SEQ ID NO: 3626 - protein, 9 aa, synthetic construct
VFWMQLRDH

SEQ ID NO: 3627 - protein, 9 aa, synthetic construct
VFYLSSQSC

SEQ ID NO: 3628 - protein, 9 aa, synthetic construct
VGDHKNCMN

SEQ ID NO: 3629 - protein, 9 aa, synthetic construct
VGEKTHGPL

SEQ ID NO: 3630 - protein, 9 aa, synthetic construct
VGEPHFHSD

SEQ ID NO: 3631 - protein, 9 aa, synthetic construct
VGGYSNQWV

SEQ ID NO: 3632 - protein, 9 aa, synthetic construct
VGHWKVQSC

SEQ ID NO: 3633 - protein, 9 aa, synthetic construct
VGHWKVQSY

SEQ ID NO: 3634 - protein, 9 aa, synthetic construct
VGIMRNDTG

SEQ ID NO: 3635 - protein, 9 aa, synthetic construct
VGIQTQSCF

SEQ ID NO: 3636 - protein, 9 aa, synthetic construct
VGKGIEKVQ

SEQ ID NO: 3637 - protein, 9 aa, synthetic construct
VGLALNCES

SEQ ID NO: 3638 - protein, 9 aa, synthetic construct
VGNPYHHGR

SEQ ID NO: 3639 - protein, 9 aa, synthetic construct
VGQGIEKVQ

SEQ ID NO: 3640 - protein, 9 aa, synthetic construct
VGQHIWAQD

SEQ ID NO: 3641 - protein, 9 aa, synthetic construct
VGQREVPSD

SEQ ID NO: 3642 - protein, 9 aa, synthetic construct
VGRWHYCTE

SEQ ID NO: 3643 - protein, 9 aa, synthetic construct
VGTSFACSN

SEQ ID NO: 3644 - protein, 9 aa, synthetic construct
VGVQCSNGG

SEQ ID NO: 3645 - protein, 9 aa, synthetic construct
VHAPNNLVA

SEQ ID NO: 3646 - protein, 9 aa, synthetic construct
VHDKWNAHT

SEQ ID NO: 3647 - protein, 9 aa, synthetic construct
VHDMCQWSD

SEQ ID NO: 3648 - protein, 9 aa, synthetic construct
VHELFMDMD

SEQ ID NO: 3649 - protein, 9 aa, synthetic construct
VHKCADYMC

SEQ ID NO: 3650 - protein, 9 aa, synthetic construct
VHQPTQMHH

SEQ ID NO: 3651 - protein, 9 aa, synthetic construct
VHQPTQSHH

SEQ ID NO: 3652 - protein, 9 aa, synthetic construct
VHSFSEVTM

SEQ ID NO: 3653 - protein, 9 aa, synthetic construct
VHTTYCQRE

SEQ ID NO: 3654 - protein, 9 aa, synthetic construct
VHYRLCEHW

SEQ ID NO: 3655 - protein, 9 aa, synthetic construct
VIDRLMACS

SEQ ID NO: 3656 - protein, 9 aa, synthetic construct
VIEFFKAQC

SEQ ID NO: 3657 - protein, 9 aa, synthetic construct
VIFSMYTCF

SEQ ID NO: 3658 - protein, 9 aa, synthetic construct
VIGLCMGIV

SEQ ID NO: 3659 - protein, 9 aa, synthetic construct
VIGLCTGIV

SEQ ID NO: 3660 - protein, 9 aa, synthetic construct
VIIEEQDNS

SEQ ID NO: 3661 - protein, 9 aa, synthetic construct
VIKHALAEI

SEQ ID NO: 3662 - protein, 9 aa, synthetic construct
VIMYWHHCS

SEQ ID NO: 3663 - protein, 9 aa, synthetic construct
VIQSYQAVF

SEQ ID NO: 3664 - protein, 9 aa, synthetic construct
VKESDNWQQ

SEQ ID NO: 3665 - protein, 9 aa, synthetic construct
VKFAWQKIN

SEQ ID NO: 3666 - protein, 9 aa, synthetic construct
VKMEYQGGR

SEQ ID NO: 3667 - protein, 9 aa, synthetic construct
VKQLRQDGF

SEQ ID NO: 3668 - protein, 9 aa, synthetic construct
VLAMRVRHK

SEQ ID NO: 3669 - protein, 9 aa, synthetic construct
VLSNWEVAA

SEQ ID NO: 3670 - protein, 9 aa, synthetic construct
VMAPYMWDP

SEQ ID NO: 3671 - protein, 9 aa, synthetic construct
VMDCVNAYW

SEQ ID NO: 3672 - protein, 9 aa, synthetic construct
VMDFYMSGP

SEQ ID NO: 3673 - protein, 9 aa, synthetic construct
VMDQYKLKV

SEQ ID NO: 3674 - protein, 9 aa, synthetic construct
VMEFYKAQC

SEQ ID NO: 3675 - protein, 9 aa, synthetic construct
VMEFYMSPP

SEQ ID NO: 3676 - protein, 9 aa, synthetic construct
VMEHWGSQY

SEQ ID NO: 3677 - protein, 9 aa, synthetic construct
VMEWWGSLY

SEQ ID NO: 3678 - protein, 9 aa, synthetic construct
VMGNSMCLF

SEQ ID NO: 3679 - protein, 9 aa, synthetic construct
VMGPCMNYD

SEQ ID NO: 3680 - protein, 9 aa, synthetic construct
VMHINEQAM

SEQ ID NO: 3681 - protein, 9 aa, synthetic construct
VMMHYGGFY

SEQ ID NO: 3682 - protein, 9 aa, synthetic construct
VMQGFNYGF

SEQ ID NO: 3683 - protein, 9 aa, synthetic construct
VMQMINLAH

SEQ ID NO: 3684 - protein, 9 aa, synthetic construct
VMSDEWQTI

SEQ ID NO: 3685 - protein, 9 aa, synthetic construct
VMTICQSQE

SEQ ID NO: 3686 - protein, 9 aa, synthetic construct
VNADITFGA

SEQ ID NO: 3687 - protein, 9 aa, synthetic construct
VNGREPRWK

SEQ ID NO: 3688 - protein, 9 aa, synthetic construct
VNGREPRWQ

SEQ ID NO: 3689 - protein, 9 aa, synthetic construct
VNITYTLQP

SEQ ID NO: 3690 - protein, 9 aa, synthetic construct
VNMMCGHES

SEQ ID NO: 3691 - protein, 9 aa, synthetic construct
VNRIRDMSV

SEQ ID NO: 3692 - protein, 9 aa, synthetic construct
VNVDCNVQQ

SEQ ID NO: 3693 - protein, 9 aa, synthetic construct
VPEISWSNH

SEQ ID NO: 3694 - protein, 9 aa, synthetic construct
VPICCNLPM

SEQ ID NO: 3695 - protein, 9 aa, synthetic construct
VPLGFNFAG

SEQ ID NO: 3696 - protein, 9 aa, synthetic construct
VQHMSQSDY

SEQ ID NO: 3697 - protein, 9 aa, synthetic construct
VQHMSQSGT

SEQ ID NO: 3698 - protein, 9 aa, synthetic construct
VQHQEEFQT

SEQ ID NO: 3699 - protein, 9 aa, synthetic construct
VQIRTIRQE

SEQ ID NO: 3700 - protein, 9 aa, synthetic construct
VQKQEHAKY

SEQ ID NO: 3701 - protein, 9 aa, synthetic construct
VQMWTIRQE

SEQ ID NO: 3702 - protein, 9 aa, synthetic construct
VQNWKLDKI

SEQ ID NO: 3703 - protein, 9 aa, synthetic construct
VQQFCFQHQ

SEQ ID NO: 3704 - protein, 9 aa, synthetic construct
VRIQFSQAL

SEQ ID NO: 3705 - protein, 9 aa, synthetic construct
VRQMIDHLA

SEQ ID NO: 3706 - protein, 9 aa, synthetic construct
VRSGQQAIF

SEQ ID NO: 3707 - protein, 9 aa, synthetic construct
VSAAWGQME

SEQ ID NO: 3708 - protein, 9 aa, synthetic construct
VSAFGHKAG

SEQ ID NO: 3709 - protein, 9 aa, synthetic construct
VSASFQQHV

SEQ ID NO: 3710 - protein, 9 aa, synthetic construct
VSAVVGQME

SEQ ID NO: 3711 - protein, 9 aa, synthetic construct
VSCEQGKIK

SEQ ID NO: 3712 - protein, 9 aa, synthetic construct
VSDLWQSQE

SEQ ID NO: 3713 - protein, 9 aa, synthetic construct
VSEHCQEGN

SEQ ID NO: 3714 - protein, 9 aa, synthetic construct
VSEHCQEVF

SEQ ID NO: 3715 - protein, 9 aa, synthetic construct
VSEPFEHCD

SEQ ID NO: 3716 - protein, 9 aa, synthetic construct
VSEPHFHKD

SEQ ID NO: 3717 - protein, 9 aa, synthetic construct
VSERDKIYG

SEQ ID NO: 3718 - protein, 9 aa, synthetic construct
VSHNQIYGM

SEQ ID NO: 3719 - protein, 9 aa, synthetic construct
VSLGTHAHH

SEQ ID NO: 3720 - protein, 9 aa, synthetic construct
VSMNTPFCL

SEQ ID NO: 3721 - protein, 9 aa, synthetic construct
VSMWYDRDD

SEQ ID NO: 3722 - protein, 9 aa, synthetic construct
VSSAMTWMT

SEQ ID NO: 3723 - protein, 9 aa, synthetic construct
VSSQYNHLE

SEQ ID NO: 3724 - protein, 9 aa, synthetic construct
VSTRFPMAQ

SEQ ID NO: 3725 - protein, 9 aa, synthetic construct
VSTRMYACS

SEQ ID NO: 3726 - protein, 9 aa, synthetic construct
VSVNEDRAG

SEQ ID NO: 3727 - protein, 9 aa, synthetic construct
VTAATGAST

SEQ ID NO: 3728 - protein, 9 aa, synthetic construct
VTAPSNLVA

SEQ ID NO: 3729 - protein, 9 aa, synthetic construct
VTCRQEGGG

SEQ ID NO: 3730 - protein, 9 aa, synthetic construct
VTDQIWVHN

SEQ ID NO: 3731 - protein, 9 aa, synthetic construct
VTDRADQNY

SEQ ID NO: 3732 - protein, 9 aa, synthetic construct
VTDRIEQYH

SEQ ID NO: 3733 - protein, 9 aa, synthetic construct
VTEHCVRQP

SEQ ID NO: 3734 - protein, 9 aa, synthetic construct
VTEIRPSFG

SEQ ID NO: 3735 - protein, 9 aa, synthetic construct
VTELNMAAW

SEQ ID NO: 3736 - protein, 9 aa, synthetic construct
VTEPLEHCF

SEQ ID NO: 3737 - protein, 9 aa, synthetic construct
VTESWNEHL

SEQ ID NO: 3738 - protein, 9 aa, synthetic construct
VTGFGPATP

SEQ ID NO: 3739 - protein, 9 aa, synthetic construct
VTHLSASSD

SEQ ID NO: 3740 - protein, 9 aa, synthetic construct
VTIPVDYFT

SEQ ID NO: 3741 - protein, 9 aa, synthetic construct
VTNVCQCEA

SEQ ID NO: 3742 - protein, 9 aa, synthetic construct
VTQFCLSGK

SEQ ID NO: 3743 - protein, 9 aa, synthetic construct
VTQSIQEVA

SEQ ID NO: 3744 - protein, 9 aa, synthetic construct
VTSCGQENC

SEQ ID NO: 3745 - protein, 9 aa, synthetic construct
VTTGMQIEE

SEQ ID NO: 3746 - protein, 9 aa, synthetic construct
VTVAVQPCS

SEQ ID NO: 3747 - protein, 9 aa, synthetic construct
VTVNGNAGW

SEQ ID NO: 3748 - protein, 9 aa, synthetic construct
VVCDMLTSL

SEQ ID NO: 3749 - protein, 9 aa, synthetic construct
VVCQPVPCV

SEQ ID NO: 3750 - protein, 9 aa, synthetic construct
VVDNPMMGQ

SEQ ID NO: 3751 - protein, 9 aa, synthetic construct
VVGLEGACK

SEQ ID NO: 3752 - protein, 9 aa, synthetic construct
VVHEITINS

SEQ ID NO: 3753 - protein, 9 aa, synthetic construct
VVHIEWRPT

SEQ ID NO: 3754 - protein, 9 aa, synthetic construct
VVIPMPCCS

SEQ ID NO: 3755 - protein, 9 aa, synthetic construct
VVKCKPQFC

SEQ ID NO: 3756 - protein, 9 aa, synthetic construct
VVPPCMDCG

SEQ ID NO: 3757 - protein, 9 aa, synthetic construct
VVSARVNVQ

SEQ ID NO: 3758 - protein, 9 aa, synthetic construct
VVTAEFEFV

SEQ ID NO: 3759 - protein, 9 aa, synthetic construct
VVVLEGSCK

SEQ ID NO: 3760 - protein, 9 aa, synthetic construct
VWEIFDAMS

SEQ ID NO: 3761 - protein, 9 aa, synthetic construct
VWSGQQAIF

SEQ ID NO: 3762 - protein, 9 aa, synthetic construct
VWVCQHWVQ

SEQ ID NO: 3763 - protein, 9 aa, synthetic construct
VYDEWTKNV

SEQ ID NO: 3764 - protein, 9 aa, synthetic construct
VYEQMAYCP

SEQ ID NO: 3765 - protein, 9 aa, synthetic construct
VYGHMQNWF

SEQ ID NO: 3766 - protein, 9 aa, synthetic construct
VYLPYYWQF

SEQ ID NO: 3767 - protein, 9 aa, synthetic construct
VYPDSAVQL

SEQ ID NO: 3768 - protein, 9 aa, synthetic construct
VYQHWWRVH

SEQ ID NO: 3769 - protein, 9 aa, synthetic construct
VYQHYFVDQ

SEQ ID NO: 3770 - protein, 9 aa, synthetic construct
VYSFFYQNE

SEQ ID NO: 3771 - protein, 9 aa, synthetic construct
VYTMRSALE

SEQ ID NO: 3772 - protein, 9 aa, synthetic construct
VYVLASAQK

SEQ ID NO: 3773 - protein, 9 aa, synthetic construct
VYYCEIREH

SEQ ID NO: 3774 - protein, 9 aa, synthetic construct
WADDKKHYG

SEQ ID NO: 3775 - protein, 9 aa, synthetic construct
WAECRYQTT

SEQ ID NO: 3776 - protein, 9 aa, synthetic construct
WAGVEQRGE

SEQ ID NO: 3777 - protein, 9 aa, synthetic construct
WAGWIPSSI

SEQ ID NO: 3778 - protein, 9 aa, synthetic construct
WAIPMPHCQ

SEQ ID NO: 3779 - protein, 9 aa, synthetic construct
WCCRPINAN

SEQ ID NO: 3780 - protein, 9 aa, synthetic construct
WCDSVEPPG

SEQ ID NO: 3781 - protein, 9 aa, synthetic construct
WCEHVIMNP

SEQ ID NO: 3782 - protein, 9 aa, synthetic construct
WDAYYTNGI

SEQ ID NO: 3783 - protein, 9 aa, synthetic construct
WDGQKMWYC

SEQ ID NO: 3784 - protein, 9 aa, synthetic construct
WDSPKNFWI

SEQ ID NO: 3785 - protein, 9 aa, synthetic construct
WDVRDHAFY

SEQ ID NO: 3786 - protein, 9 aa, synthetic construct
WEVDVCNDR

SEQ ID NO: 3787 - protein, 9 aa, synthetic construct
WEWNAKHKC

SEQ ID NO: 3788 - protein, 9 aa, synthetic construct
WFEHASHVF

SEQ ID NO: 3789 - protein, 9 aa, synthetic construct
WFKGVDHRQ

SEQ ID NO: 3790 - protein, 9 aa, synthetic construct
WFMYLTNAL

SEQ ID NO: 3791 - protein, 9 aa, synthetic construct
WFQTMDHVM

SEQ ID NO: 3792 - protein, 9 aa, synthetic construct
WFYRHNHVE

SEQ ID NO: 3793 - protein, 9 aa, synthetic construct
WGDARMIGP

SEQ ID NO: 3794 - protein, 9 aa, synthetic construct
WGDKQATDR

SEQ ID NO: 3795 - protein, 9 aa, synthetic construct
WHDYQLAAE

SEQ ID NO: 3796 - protein, 9 aa, synthetic construct
WHFKIHVQP

SEQ ID NO: 3797 - protein, 9 aa, synthetic construct
WHFLMIFYI

SEQ ID NO: 3798 - protein, 9 aa, synthetic construct
WHGFGKWSR

SEQ ID NO: 3799 - protein, 9 aa, synthetic construct
WHSHYLLHH

SEQ ID NO: 3800 - protein, 9 aa, synthetic construct
WHVSHWPKL

SEQ ID NO: 3801 - protein, 9 aa, synthetic construct
WHYPWDDWH

SEQ ID NO: 3802 - protein, 9 aa, synthetic construct
WIGSKNSCE

SEQ ID NO: 3803 - protein, 9 aa, synthetic construct
WITSKIKSD

SEQ ID NO: 3804 - protein, 9 aa, synthetic construct
WITSKINSD

SEQ ID NO: 3805 - protein, 9 aa, synthetic construct
WIYPFSFGL

SEQ ID NO: 3806 - protein, 9 aa, synthetic construct
WKAIVLEYW

SEQ ID NO: 3807 - protein, 9 aa, synthetic construct
WKWWADYLA

SEQ ID NO: 3808 - protein, 9 aa, synthetic construct
WLFMHRWAD

SEQ ID NO: 3809 - protein, 9 aa, synthetic construct
WLIEIERHG

SEQ ID NO: 3810 - protein, 9 aa, synthetic construct
WLPLCFPCA

SEQ ID NO: 3811 - protein, 9 aa, synthetic construct
WLPLCFPWA

SEQ ID NO: 3812 - protein, 9 aa, synthetic construct
WLPMVMNKG

SEQ ID NO: 3813 - protein, 9 aa, synthetic construct
WMEYINHEA

SEQ ID NO: 3814 - protein, 9 aa, synthetic construct
WMMQYIIFP

SEQ ID NO: 3815 - protein, 9 aa, synthetic construct
WMSEQMFKG

SEQ ID NO: 3816 - protein, 9 aa, synthetic construct
WNNVELSTP

SEQ ID NO: 3817 - protein, 9 aa, synthetic construct
WNQHKRDQR

SEQ ID NO: 3818 - protein, 9 aa, synthetic construct
WNRELQPPG

SEQ ID NO: 3819 - protein, 9 aa, synthetic construct
WNSCHQTWI

SEQ ID NO: 3820 - protein, 9 aa, synthetic construct
WNYWLLPDD

SEQ ID NO: 3821 - protein, 9 aa, synthetic construct
WPDSESEEV

SEQ ID NO: 3822 - protein, 9 aa, synthetic construct
WPHTMDHVM

SEQ ID NO: 3823 - protein, 9 aa, synthetic construct
WPKQGNAME

SEQ ID NO: 3824 - protein, 9 aa, synthetic construct
WPQQGNAME

SEQ ID NO: 3825 - protein, 9 aa, synthetic construct
WQAVIYANQ

SEQ ID NO: 3826 - protein, 9 aa, synthetic construct
WQKLQGNRG

SEQ ID NO: 3827 - protein, 9 aa, synthetic construct
WRFCIKIGM

SEQ ID NO: 3828 - protein, 9 aa, synthetic construct
WSQSVAKML

SEQ ID NO: 3829 - protein, 9 aa, synthetic construct
WSTGCMQGM

SEQ ID NO: 3830 - protein, 9 aa, synthetic construct
WTANYDYYE

SEQ ID NO: 3831 - protein, 9 aa, synthetic construct
WTCWLLGWF

SEQ ID NO: 3832 - protein, 9 aa, synthetic construct
WVAHTTGHA

SEQ ID NO: 3833 - protein, 9 aa, synthetic construct
WVEIKVMDQ

SEQ ID NO: 3834 - protein, 9 aa, synthetic construct
WVYSLGRAE

SEQ ID NO: 3835 - protein, 9 aa, synthetic construct
WWNHWLWNG

SEQ ID NO: 3836 - protein, 9 aa, synthetic construct
WWRASHRDD

SEQ ID NO: 3837 - protein, 9 aa, synthetic construct
WWWLSTGNQ

SEQ ID NO: 3838 - protein, 9 aa, synthetic construct
YADMFQCEK

SEQ ID NO: 3839 - protein, 9 aa, synthetic construct
YADMFQCVK

SEQ ID NO: 3840 - protein, 9 aa, synthetic construct
YAGPNMHWG

SEQ ID NO: 3841 - protein, 9 aa, synthetic construct
YAHLLNQQA

SEQ ID NO: 3842 - protein, 9 aa, synthetic construct
YAILHQTSK

SEQ ID NO: 3843 - protein, 9 aa, synthetic construct
YAITQSCFT

SEQ ID NO: 3844 - protein, 9 aa, synthetic construct
YAITQSRST

SEQ ID NO: 3845 - protein, 9 aa, synthetic construct
YAIWNMHFT

SEQ ID NO: 3846 - protein, 9 aa, synthetic construct
YALQITRSQ

SEQ ID NO: 3847 - protein, 9 aa, synthetic construct
YALVMGIHN

SEQ ID NO: 3848 - protein, 9 aa, synthetic construct
YAQLMYIDP

SEQ ID NO: 3849 - protein, 9 aa, synthetic construct
YASPQSGAW

SEQ ID NO: 3850 - protein, 9 aa, synthetic construct
YATERYCVC

SEQ ID NO: 3851 - protein, 9 aa, synthetic construct
YATSMHAHK

SEQ ID NO: 3852 - protein, 9 aa, synthetic construct
YCCNQEPFA

SEQ ID NO: 3853 - protein, 9 aa, synthetic construct
YCEPVQDNF

SEQ ID NO: 3854 - protein, 9 aa, synthetic construct
YCISLIYHH

SEQ ID NO: 3855 - protein, 9 aa, synthetic construct
YCQPVDQFY

SEQ ID NO: 3856 - protein, 9 aa, synthetic construct
YCYLSSASC

SEQ ID NO: 3857 - protein, 9 aa, synthetic construct
YCYVCQMTT

SEQ ID NO: 3858 - protein, 9 aa, synthetic construct
YDNSVGHSL

SEQ ID NO: 3859 - protein, 9 aa, synthetic construct
YDTNQIVCP

SEQ ID NO: 3860 - protein, 9 aa, synthetic construct
YEDNNVMQI

SEQ ID NO: 3861 - protein, 9 aa, synthetic construct
YEGRPSDAQ

SEQ ID NO: 3862 - protein, 9 aa, synthetic construct
YESCNLTRG

SEQ ID NO: 3863 - protein, 9 aa, synthetic construct
YFDWFYNHM

SEQ ID NO: 3864 - protein, 9 aa, synthetic construct
YFDYHERKG

SEQ ID NO: 3865 - protein, 9 aa, synthetic construct
YFGTSLRAQ

SEQ ID NO: 3866 - protein, 9 aa, synthetic construct
YFHWHDCIG

SEQ ID NO: 3867 - protein, 9 aa, synthetic construct
YFTTMHVMG

SEQ ID NO: 3868 - protein, 9 aa, synthetic construct
YFWSNHFFR

SEQ ID NO: 3869 - protein, 9 aa, synthetic construct
YGNLMGVGP

SEQ ID NO: 3870 - protein, 9 aa, synthetic construct
YGTLCGVGI

SEQ ID NO: 3871 - protein, 9 aa, synthetic construct
YHAPMLMCN

SEQ ID NO: 3872 - protein, 9 aa, synthetic construct
YHIWCVYWA

SEQ ID NO: 3873 - protein, 9 aa, synthetic construct
YIELRHREA

SEQ ID NO: 3874 - protein, 9 aa, synthetic construct
YIFACGVKG

SEQ ID NO: 3875 - protein, 9 aa, synthetic construct
YKPNYEIME

SEQ ID NO: 3876 - protein, 9 aa, synthetic construct
YKQRISHWL

SEQ ID NO: 3877 - protein, 9 aa, synthetic construct
YLGMWLAPV

SEQ ID NO: 3878 - protein, 9 aa, synthetic construct
YLIPWPRLG

SEQ ID NO: 3879 - protein, 9 aa, synthetic construct
YLMPHWFII

SEQ ID NO: 3880 - protein, 9 aa, synthetic construct
YLSDMCWRG

SEQ ID NO: 3881 - protein, 9 aa, synthetic construct
YLSFMCAIQ

SEQ ID NO: 3882 - protein, 9 aa, synthetic construct
YLTLQGMQE

SEQ ID NO: 3883 - protein, 9 aa, synthetic construct
YMDPVVAMN

SEQ ID NO: 3884 - protein, 9 aa, synthetic construct
YMDRGNIGE

SEQ ID NO: 3885 - protein, 9 aa, synthetic construct
YMERGNIGE

SEQ ID NO: 3886 - protein, 9 aa, synthetic construct
YMSNIIHHN

SEQ ID NO: 3887 - protein, 9 aa, synthetic construct
YMTTQTGYP

SEQ ID NO: 3888 - protein, 9 aa, synthetic construct
YMTYIQSQE

SEQ ID NO: 3889 - protein, 9 aa, synthetic construct
YNKQMMNCP

SEQ ID NO: 3890 - protein, 9 aa, synthetic construct
YPAPYYPAE

SEQ ID NO: 3891 - protein, 9 aa, synthetic construct
YPIQCSVSF

SEQ ID NO: 3892 - protein, 9 aa, synthetic construct
YPYQGHNWT

SEQ ID NO: 3893 - protein, 9 aa, synthetic construct
YQAHYMSMT

SEQ ID NO: 3894 - protein, 9 aa, synthetic construct
YQDIHQCIF

SEQ ID NO: 3895 - protein, 9 aa, synthetic construct
YQFCKPSDD

SEQ ID NO: 3896 - protein, 9 aa, synthetic construct
YQFCKPSDE

SEQ ID NO: 3897 - protein, 9 aa, synthetic construct
YQGEVERAF

SEQ ID NO: 3898 - protein, 9 aa, synthetic construct
YQGYEPHMH

SEQ ID NO: 3899 - protein, 9 aa, synthetic construct
YQHHYHLPW

SEQ ID NO: 3900 - protein, 9 aa, synthetic construct
YQMQMTYVW

SEQ ID NO: 3901 - protein, 9 aa, synthetic construct
YQQQMFERQ

SEQ ID NO: 3902 - protein, 9 aa, synthetic construct
YQSQGIWIE

SEQ ID NO: 3903 - protein, 9 aa, synthetic construct
YQTLCMHQD

SEQ ID NO: 3904 - protein, 9 aa, synthetic construct
YQTVFTLYF

SEQ ID NO: 3905 - protein, 9 aa, synthetic construct
YSAHWCKGD

SEQ ID NO: 3906 - protein, 9 aa, synthetic construct
YSGVRVTGY

SEQ ID NO: 3907 - protein, 9 aa, synthetic construct
YSKHQMCID

SEQ ID NO: 3908 - protein, 9 aa, synthetic construct
YSNSTIMNL

SEQ ID NO: 3909 - protein, 9 aa, synthetic construct
YSQFFSAEE

SEQ ID NO: 3910 - protein, 9 aa, synthetic construct
YSQLMHGGH

SEQ ID NO: 3911 - protein, 9 aa, synthetic construct
YSQSWNRLG

SEQ ID NO: 3912 - protein, 9 aa, synthetic construct
YSQSWNRLW

SEQ ID NO: 3913 - protein, 9 aa, synthetic construct
YSSELECQW

SEQ ID NO: 3914 - protein, 9 aa, synthetic construct
YSTICNFSI

SEQ ID NO: 3915 - protein, 9 aa, synthetic construct
YSTIHAGHP

SEQ ID NO: 3916 - protein, 9 aa, synthetic construct
YSTTMHVMG

SEQ ID NO: 3917 - protein, 9 aa, synthetic construct
YSVSFGCQS

SEQ ID NO: 3918 - protein, 9 aa, synthetic construct
YTDPVLHNP

SEQ ID NO: 3919 - protein, 9 aa, synthetic construct
YTGMSCTMK

SEQ ID NO: 3920 - protein, 9 aa, synthetic construct
YTHEESAHF

SEQ ID NO: 3921 - protein, 9 aa, synthetic construct
YTKTYVDCF

SEQ ID NO: 3922 - protein, 9 aa, synthetic construct
YTQHLVGQY

SEQ ID NO: 3923 - protein, 9 aa, synthetic construct
YTTFTEHWQ

SEQ ID NO: 3924 - protein, 9 aa, synthetic construct
YVAEAHCSY

SEQ ID NO: 3925 - protein, 9 aa, synthetic construct
YVCPSVNWN

SEQ ID NO: 3926 - protein, 9 aa, synthetic construct
YVEDRNGWH

SEQ ID NO: 3927 - protein, 9 aa, synthetic construct
YVENRNGWH

SEQ ID NO: 3928 - protein, 9 aa, synthetic construct
YVHDHLHQQ

SEQ ID NO: 3929 - protein, 9 aa, synthetic construct
YVNIHNRHG

SEQ ID NO: 3930 - protein, 9 aa, synthetic construct
YVNIHNRNG

SEQ ID NO: 3931 - protein, 9 aa, synthetic construct
YVNKDEFRF

SEQ ID NO: 3932 - protein, 9 aa, synthetic construct
YVSVTLQNS

SEQ ID NO: 3933 - protein, 9 aa, synthetic construct
YVTASWHGF

SEQ ID NO: 3934 - protein, 9 aa, synthetic construct
YVYIRKNAL

SEQ ID NO: 3935 - protein, 9 aa, synthetic construct
YWQSMLWQG

SEQ ID NO: 3936 - protein, 9 aa, synthetic construct
YYCLRFVLE

SEQ ID NO: 3937 - protein, 9 aa, synthetic construct
YYTQFSSDY

SEQ ID NO: 3938 - protein, 9 aa, synthetic construct
EAKWSGLGR

SEQ ID NO: 3939 - protein, 9 aa, synthetic construct
QAYFYLMSS

SEQ ID NO: 3940 - protein, 9 aa, synthetic construct
LFRQNQQFY

SEQ ID NO: 3941 - protein, 9 aa, synthetic construct
QWRGYLSKA

SEQ ID NO: 3942 - protein, 9 aa, synthetic construct
SFGWFDAHI

SEQ ID NO: 3943 - protein, 9 aa, synthetic construct
DANQYHVSY

SEQ ID NO: 3944 - protein, 9 aa, synthetic construct
QAFTNLDQM

SEQ ID NO: 3945 - protein, 9 aa, synthetic construct
LGVYNQSFE

SEQ ID NO: 3946 - protein, 9 aa, synthetic construct
HQSFVQCVH

SEQ ID NO: 3947 - protein, 9 aa, synthetic construct
QYQSQWMSF

SEQ ID NO: 3948 - protein, 9 aa, synthetic construct
HYSQYQNFT

SEQ ID NO: 3949 - protein, 9 aa, synthetic construct
GNQQVNQQM

SEQ ID NO: 3950 - protein, 9 aa, synthetic construct
LFNSMHQFD

SEQ ID NO: 3951 - protein, 9 aa, synthetic construct
QASVYFWQQ

SEQ ID NO: 3952 - protein, 9 aa, synthetic construct
RQSWVFVNH

SEQ ID NO: 3953 - protein, 9 aa, synthetic construct
DAYKVQCYC

SEQ ID NO: 3954 - protein, 9 aa, synthetic construct
EFMTSMTMM

SEQ ID NO: 3955 - protein, 9 aa, synthetic construct
QFALINFDQ

SEQ ID NO: 3956 - protein, 9 aa, synthetic construct
DASMIIMML

SEQ ID NO: 3957 - protein, 9 aa, synthetic construct
QFSLVSLEA

SEQ ID NO: 3958 - protein, 9 aa, synthetic construct
QHLFSNIIP

SEQ ID NO: 3959 - protein, 9 aa, synthetic construct
TWFDMVMCD

SEQ ID NO: 3960 - protein, 9 aa, synthetic construct
HAEYKDAGS

SEQ ID NO: 3961 - protein, 9 aa, synthetic construct
QNSFYSQMG

SEQ ID NO: 3962 - protein, 9 aa, synthetic construct
ELQQIYCAG

SEQ ID NO: 3963 - protein, 9 aa, synthetic construct
SFEHLDCLL

SEQ ID NO: 3964 - protein, 9 aa, synthetic construct
FYAFNMSDN

SEQ ID NO: 3965 - protein, 9 aa, synthetic construct
LSWMQYEFL

SEQ ID NO: 3966 - protein, 9 aa, synthetic construct
QSFNYLFYG

SEQ ID NO: 3967 - protein, 9 aa, synthetic construct
RWQFIHLSK

SEQ ID NO: 3968 - protein, 9 aa, synthetic construct
TFLMNFALD

SEQ ID NO: 3969 - protein, 9 aa, synthetic construct
RWDTYGSWM

SEQ ID NO: 3970 - protein, 9 aa, synthetic construct
GQQQSFSYQ

SEQ ID NO: 3971 - protein, 9 aa, synthetic construct
LFTHCILNE

SEQ ID NO: 3972 - protein, 9 aa, synthetic construct
PTDNINFQM

SEQ ID NO: 3973 - protein, 9 aa, synthetic construct
SFVTFNNSW

SEQ ID NO: 3974 - protein, 9 aa, synthetic construct
FTSSYKCYF

SEQ ID NO: 3975 - protein, 9 aa, synthetic construct
QAHHYNILN

SEQ ID NO: 3976 - protein, 9 aa, synthetic construct
LFDQFYSWS

SEQ ID NO: 3977 - protein, 9 aa, synthetic construct
QWMGLIRWK

SEQ ID NO: 3978 - protein, 9 aa, synthetic construct
HYLPFMYMQ

SEQ ID NO: 3979 - protein, 9 aa, synthetic construct
LFNRSLRYE

SEQ ID NO: 3980 - protein, 9 aa, synthetic construct
FWQLKHGAC

SEQ ID NO: 3981 - protein, 9 aa, synthetic construct
LSLNELALL

SEQ ID NO: 3982 - protein, 9 aa, synthetic construct
INFEMMDTD

SEQ ID NO: 3983 - protein, 9 aa, synthetic construct
LSHTYIEIA

SEQ ID NO: 3984 - protein, 9 aa, synthetic construct
DVAKYMYML

SEQ ID NO: 3985 - protein, 9 aa, synthetic construct
PINSGIYWH

SEQ ID NO: 3986 - protein, 9 aa, synthetic construct
ECSTSMGQF

SEQ ID NO: 3987 - protein, 9 aa, synthetic construct
TSVFYQSNG

SEQ ID NO: 3988 - protein, 9 aa, synthetic construct
TYSSFNFTC

SEQ ID NO: 3989 - protein, 9 aa, synthetic construct
CSSFYFESK

SEQ ID NO: 3990 - protein, 9 aa, synthetic construct
EATYTNAAC

SEQ ID NO: 3991 - protein, 9 aa, synthetic construct
DAWQSNGWQ

SEQ ID NO: 3992 - protein, 9 aa, synthetic construct
MIILILPYS

SEQ ID NO: 3993 - protein, 9 aa, synthetic construct
EADTHWHHN

SEQ ID NO: 3994 - protein, 9 aa, synthetic construct
RHLFWDILE

SEQ ID NO: 3995 - protein, 9 aa, synthetic construct
EFMNASHHF

SEQ ID NO: 3996 - protein, 9 aa, synthetic construct
QFQSVMQQY

SEQ ID NO: 3997 - protein, 9 aa, synthetic construct
MWNQQDCKD

SEQ ID NO: 3998 - protein, 9 aa, synthetic construct
RSEPCKNYG

SEQ ID NO: 3999 - protein, 9 aa, synthetic construct
SIIQANSSF

SEQ ID NO: 4000 - protein, 9 aa, synthetic construct
DATTSYVYC

SEQ ID NO: 4001 - protein, 9 aa, synthetic construct
RFDINLDQF

SEQ ID NO: 4002 - protein, 9 aa, synthetic construct
QWTENVMAR

SEQ ID NO: 4003 - protein, 9 aa, synthetic construct
DSFYSSQQA

SEQ ID NO: 4004 - protein, 9 aa, synthetic construct
PVTQYMSFM

SEQ ID NO: 4005 - protein, 9 aa, synthetic construct
HSQVQQMQI

SEQ ID NO: 4006 - protein, 9 aa, synthetic construct
FVQFWVGYQ

SEQ ID NO: 4007 - protein, 9 aa, synthetic construct
YSKWIGIDQ

SEQ ID NO: 4008 - protein, 9 aa, synthetic construct
YFSQYNVQS

SEQ ID NO: 4009 - protein, 9 aa, synthetic construct
CAAHATAHQ

SEQ ID NO: 4010 - protein, 9 aa, synthetic construct
VHSQITCED

SEQ ID NO: 4011 - protein, 9 aa, synthetic construct
VIFNFYSMG

SEQ ID NO: 4012 - protein, 9 aa, synthetic construct
LFSLRMIDR

SEQ ID NO: 4013 - protein, 9 aa, synthetic construct
SWYCMQAIE

SEQ ID NO: 4014 - protein, 9 aa, synthetic construct
LFLTLSTFN

SEQ ID NO: 4015 - protein, 9 aa, synthetic construct
QAIGYRIWC

SEQ ID NO: 4016 - protein, 9 aa, synthetic construct
QILLFNACR

SEQ ID NO: 4017 - protein, 9 aa, synthetic construct
RTMDTNMFD

SEQ ID NO: 4018 - protein, 9 aa, synthetic construct
LIQNCSSFG

SEQ ID NO: 4019 - protein, 9 aa, synthetic construct
QWMVQHTNF

SEQ ID NO: 4020 - protein, 9 aa, synthetic construct
LFSYVQNVH

SEQ ID NO: 4021 - protein, 9 aa, synthetic construct
SMMFYRHCQ

SEQ ID NO: 4022 - protein, 9 aa, synthetic construct
DATWIMQDN

SEQ ID NO: 4023 - protein, 9 aa, synthetic construct
FAFQSNIEA

SEQ ID NO: 4024 - protein, 9 aa, synthetic construct
SFDLMFRFY

SEQ ID NO: 4025 - protein, 9 aa, synthetic construct
IAITWTSQC

SEQ ID NO: 4026 - protein, 9 aa, synthetic construct
HGFYVFFFI

SEQ ID NO: 4027 - protein, 9 aa, synthetic construct
MWMLKIDCT

SEQ ID NO: 4028 - protein, 9 aa, synthetic construct
GFDYQGLSE

SEQ ID NO: 4029 - protein, 9 aa, synthetic construct
RWFLQEQSN

SEQ ID NO: 4030 - protein, 9 aa, synthetic construct
WFCSFYALQ

SEQ ID NO: 4031 - protein, 9 aa, synthetic construct
HFMSYNSFF

SEQ ID NO: 4032 - protein, 9 aa, synthetic construct
RSFLSYGLK

SEQ ID NO: 4033 - protein, 9 aa, synthetic construct
NPMVTLANR

SEQ ID NO: 4034 - protein, 9 aa, synthetic construct
TAQSIGSQH

SEQ ID NO: 4035 - protein, 9 aa, synthetic construct
HFLSSMHQG

SEQ ID NO: 4036 - protein, 9 aa, synthetic construct
LAMSSMFFH

SEQ ID NO: 4037 - protein, 9 aa, synthetic construct
RVSNMLNCT

SEQ ID NO: 4038 - protein, 9 aa, synthetic construct
DAQMIMSIE

SEQ ID NO: 4039 - protein, 9 aa, synthetic construct
KIFTIHQFE

SEQ ID NO: 4040 - protein, 9 aa, synthetic construct
DNDFFQAQF

SEQ ID NO: 4041 - protein, 9 aa, synthetic construct
NIHYYGSGY

SEQ ID NO: 4042 - protein, 9 aa, synthetic construct
RFDLFHEQY

SEQ ID NO: 4043 - protein, 9 aa, synthetic construct
QFMLIEARF

SEQ ID NO: 4044 - protein, 9 aa, synthetic construct
LFLYYHSAT

SEQ ID NO: 4045 - protein, 9 aa, synthetic construct
SCSSHSQCC

SEQ ID NO: 4046 - protein, 9 aa, synthetic construct
NFSSIGCHF

SEQ ID NO: 4047 - protein, 9 aa, synthetic construct
IASWNQYHF

SEQ ID NO: 4048 - protein, 9 aa, synthetic construct
EASSMQFWA

SEQ ID NO: 4049 - protein, 9 aa, synthetic construct
QYEKSMTAF

SEQ ID NO: 4050 - protein, 9 aa, synthetic construct
DAHHIMEGN

SEQ ID NO: 4051 - protein, 9 aa, synthetic construct
LQIWYTEMF

SEQ ID NO: 4052 - protein, 9 aa, synthetic construct
QMGNIYSSV

SEQ ID NO: 4053 - protein, 9 aa, synthetic construct
NQSFYLHMS

SEQ ID NO: 4054 - protein, 9 aa, synthetic construct
TSESSGVGG

SEQ ID NO: 4055 - protein, 9 aa, synthetic construct
ELSFYQQFF

SEQ ID NO: 4056 - protein, 9 aa, synthetic construct
MMVYFMQQA

SEQ ID NO: 4057 - protein, 9 aa, synthetic construct
QAWFYQFDK

SEQ ID NO: 4058 - protein, 9 aa, synthetic construct
GSDIHHEQF

SEQ ID NO: 4059 - protein, 9 aa, synthetic construct
CAYMLGISQ

SEQ ID NO: 4060 - protein, 9 aa, synthetic construct
EAMWIHFFG

SEQ ID NO: 4061 - protein, 9 aa, synthetic construct
FFAANGQGC

SEQ ID NO: 4062 - protein, 9 aa, synthetic construct
RFDLQNLMK

SEQ ID NO: 4063 - protein, 9 aa, synthetic construct
QLRMWCCIH

SEQ ID NO: 4064 - protein, 9 aa, synthetic construct
VDSTSSAFM

SEQ ID NO: 4065 - protein, 9 aa, synthetic construct
RYQFWLNFT

SEQ ID NO: 4066 - protein, 9 aa, synthetic construct
RFDSVQQYF

SEQ ID NO: 4067 - protein, 9 aa, synthetic construct
IIHRYARWC

SEQ ID NO: 4068 - protein, 9 aa, synthetic construct
DATHMITQS

SEQ ID NO: 4069 - protein, 9 aa, synthetic construct
LHFFYSHSN

SEQ ID NO: 4070 - protein, 9 aa, synthetic construct
TAAPIHVWM

SEQ ID NO: 4071 - protein, 9 aa, synthetic construct
QALHIDCLH

SEQ ID NO: 4072 - protein, 9 aa, synthetic construct
KFSTMLHAT

SEQ ID NO: 4073 - protein, 9 aa, synthetic construct
NYSSSFVQM

SEQ ID NO: 4074 - protein, 9 aa, synthetic construct
TFHQTSHWF

SEQ ID NO: 4075 - protein, 9 aa, synthetic construct
SRLLNFCCI

SEQ ID NO: 4076 - protein, 9 aa, synthetic construct
QADYSYSFL

SEQ ID NO: 4077 - protein, 9 aa, synthetic construct
DYNRSDSYR

SEQ ID NO: 4078 - protein, 9 aa, synthetic construct
LYGHKMQEN

SEQ ID NO: 4079 - protein, 9 aa, synthetic construct
RFENSLTNE

SEQ ID NO: 4080 - protein, 9 aa, synthetic construct
VAMPNMEYM

SEQ ID NO: 4081 - protein, 9 aa, synthetic construct
AMCFYYMLE

SEQ ID NO: 4082 - protein, 9 aa, synthetic construct
KGEQSIIFI

SEQ ID NO: 4083 - protein, 9 aa, synthetic construct
FAMYVWMQA

SEQ ID NO: 4084 - protein, 9 aa, synthetic construct
LFHSWMRYD

SEQ ID NO: 4085 - protein, 9 aa, synthetic construct
FFTLKWHQF

SEQ ID NO: 4086 - protein, 9 aa, synthetic construct
YAYAYQFCI

SEQ ID NO: 4087 - protein, 9 aa, synthetic construct
AFIKHYLFE

SEQ ID NO: 4088 - protein, 9 aa, synthetic construct
LTSNMLARD

SEQ ID NO: 4089 - protein, 9 aa, synthetic construct
FSIMLMSSG

SEQ ID NO: 4090 - protein, 9 aa, synthetic construct
QIQQYLSQF

SEQ ID NO: 4091 - protein, 9 aa, synthetic construct
MALLKDGIE

SEQ ID NO: 4092 - protein, 9 aa, synthetic construct
RYENFHQMD

SEQ ID NO: 4093 - protein, 9 aa, synthetic construct
CAATNYHIH

SEQ ID NO: 4094 - protein, 9 aa, synthetic construct
LFREISMNA

SEQ ID NO: 4095 - protein, 9 aa, synthetic construct
QWHLFDAGV

SEQ ID NO: 4096 - protein, 9 aa, synthetic construct
SANGGSIQM

SEQ ID NO: 4097 - protein, 9 aa, synthetic construct
ATMSIMWAH

SEQ ID NO: 4098 - protein, 9 aa, synthetic construct
DVSSTEAQF

SEQ ID NO: 4099 - protein, 9 aa, synthetic construct
FLTSYTEKM

SEQ ID NO: 4100 - protein, 9 aa, synthetic construct
SFSSLSGVA

SEQ ID NO: 4101 - protein, 9 aa, synthetic construct
QHVQFTCLN

SEQ ID NO: 4102 - protein, 9 aa, synthetic construct
AAQPWEHYY

SEQ ID NO: 4103 - protein, 9 aa, synthetic construct
QMVSGDMGD

SEQ ID NO: 4104 - protein, 9 aa, synthetic construct
LFSQYNGFM

SEQ ID NO: 4105 - protein, 9 aa, synthetic construct
SGHQISDLF

SEQ ID NO: 4106 - protein, 9 aa, synthetic construct
FMQIMQMQF

SEQ ID NO: 4107 - protein, 9 aa, synthetic construct
LKLQLFNCG

SEQ ID NO: 4108 - protein, 9 aa, synthetic construct
RFEQSMSVQ

SEQ ID NO: 4109 - protein, 9 aa, synthetic construct
GNFFNNAIW

SEQ ID NO: 4110 - protein, 9 aa, synthetic construct
FLMQYGDSC

SEQ ID NO: 4111 - protein, 9 aa, synthetic construct
FAGVLLMCC

SEQ ID NO: 4112 - protein, 9 aa, synthetic construct
FAFTSLINA

SEQ ID NO: 4113 - protein, 9 aa, synthetic construct
LYSNLKRRR

SEQ ID NO: 4114 - protein, 9 aa, synthetic construct
TISFCEFFN

SEQ ID NO: 4115 - protein, 9 aa, synthetic construct
TFSLIFQMS

SEQ ID NO: 4116 - protein, 9 aa, synthetic construct
NSGVVQSCF

SEQ ID NO: 4117 - protein, 9 aa, synthetic construct
TGLEKIHFL

SEQ ID NO: 4118 - protein, 9 aa, synthetic construct
FYYMYNSVV

SEQ ID NO: 4119 - protein, 9 aa, synthetic construct
HTSHLGSQF

SEQ ID NO: 4120 - protein, 9 aa, synthetic construct
QSVHVFYSW

SEQ ID NO: 4121 - protein, 9 aa, synthetic construct
RYEPTSFMP

SEQ ID NO: 4122 - protein, 9 aa, synthetic construct
LWAQYCKSE

SEQ ID NO: 4123 - protein, 9 aa, synthetic construct
RFDQQGEYD

SEQ ID NO: 4124 - protein, 9 aa, synthetic construct
QALQMDFLY

SEQ ID NO: 4125 - protein, 9 aa, synthetic construct
DFTSTMTNG

SEQ ID NO: 4126 - protein, 9 aa, synthetic construct
RQACAQNFQ

SEQ ID NO: 4127 - protein, 9 aa, synthetic construct
AQYQWQMQF

SEQ ID NO: 4128 - protein, 9 aa, synthetic construct
QWVVYHWQI

SEQ ID NO: 4129 - protein, 9 aa, synthetic construct
LFQFQHRCR

SEQ ID NO: 4130 - protein, 9 aa, synthetic construct
YTIMMHHLM

SEQ ID NO: 4131 - protein, 9 aa, synthetic construct
LYQLFKRCY

SEQ ID NO: 4132 - protein, 9 aa, synthetic construct
HAYQSITTS

SEQ ID NO: 4133 - protein, 9 aa, synthetic construct
FFADFNKHC

SEQ ID NO: 4134 - protein, 9 aa, synthetic construct
HSGFILALG

SEQ ID NO: 4135 - protein, 9 aa, synthetic construct
TSWMMLQTH

SEQ ID NO: 4136 - protein, 9 aa, synthetic construct
HIMYIGQYP

SEQ ID NO: 4137 - protein, 9 aa, synthetic construct
VYNFLLDLG

SEQ ID NO: 4138 - protein, 9 aa, synthetic construct
SFLPINLYA

SEQ ID NO: 4139 - protein, 9 aa, synthetic construct
QSYQIQWIG

SEQ ID NO: 4140 - protein, 9 aa, synthetic construct
DHFTFNFKC

SEQ ID NO: 4141 - protein, 9 aa, synthetic construct
QDFSTFQSY

SEQ ID NO: 4142 - protein, 9 aa, synthetic construct
RFDSKMFNS

SEQ ID NO: 4143 - protein, 9 aa, synthetic construct
AAVTAIMGE

SEQ ID NO: 4144 - protein, 9 aa, synthetic construct
SGTSFGAML

SEQ ID NO: 4145 - protein, 9 aa, synthetic construct
WSNPFIHYQ

SEQ ID NO: 4146 - protein, 9 aa, synthetic construct
HVAQYNFAK

SEQ ID NO: 4147 - protein, 9 aa, synthetic construct
RIIIHQFNE

SEQ ID NO: 4148 - protein, 9 aa, synthetic construct
QAILAQNCM

SEQ ID NO: 4149 - protein, 9 aa, synthetic construct
SFCMQMSSW

SEQ ID NO: 4150 - protein, 9 aa, synthetic construct
GSQSNYHTA

SEQ ID NO: 4151 - protein, 9 aa, synthetic construct
SMDPFSQNQ

SEQ ID NO: 4152 - protein, 9 aa, synthetic construct
HGYFCQSFD

SEQ ID NO: 4153 - protein, 9 aa, synthetic construct
DRHFFFFGI

SEQ ID NO: 4154 - protein, 9 aa, synthetic construct
QYMSSQQCF

SEQ ID NO: 4155 - protein, 9 aa, synthetic construct
NFTSNQQSY

SEQ ID NO: 4156 - protein, 9 aa, synthetic construct
DCSLLNIWG

SEQ ID NO: 4157 - protein, 9 aa, synthetic construct
MATSSSSSL

SEQ ID NO: 4158 - protein, 9 aa, synthetic construct
NIMVYAQAR

SEQ ID NO: 4159 - protein, 9 aa, synthetic construct
NAYTSIHNN

SEQ ID NO: 4160 - protein, 9 aa, synthetic construct
LMQLFGVLR

SEQ ID NO: 4161 - protein, 9 aa, synthetic construct
DSGSGITWH

SEQ ID NO: 4162 - protein, 9 aa, synthetic construct
LFMHFNNMC

SEQ ID NO: 4163 - protein, 9 aa, synthetic construct
HATSVAHHY

SEQ ID NO: 4164 - protein, 9 aa, synthetic construct
ISEGHKNVL

SEQ ID NO: 4165 - protein, 9 aa, synthetic construct
MNIVIEDKI

SEQ ID NO: 4166 - protein, 9 aa, synthetic construct
AAQHSMLDS

SEQ ID NO: 4167 - protein, 9 aa, synthetic construct
FWQYVNQQE

SEQ ID NO: 4168 - protein, 9 aa, synthetic construct
RALDHLFSI

SEQ ID NO: 4169 - protein, 9 aa, synthetic construct
QWEKYLKIM

SEQ ID NO: 4170 - protein, 9 aa, synthetic construct
EAYNYQEMS

SEQ ID NO: 4171 - protein, 9 aa, synthetic construct
LAYHTSWCQ

SEQ ID NO: 4172 - protein, 9 aa, synthetic construct
NFCNCDFIL

SEQ ID NO: 4173 - protein, 9 aa, synthetic construct
HHLFLFDSI

SEQ ID NO: 4174 - protein, 9 aa, synthetic construct
FYQSAHFIF

SEQ ID NO: 4175 - protein, 9 aa, synthetic construct
QGSYVACAE

SEQ ID NO: 4176 - protein, 9 aa, synthetic construct
QAYCSHSCE

SEQ ID NO: 4177 - protein, 9 aa, synthetic construct
QYRTTQDQN

SEQ ID NO: 4178 - protein, 9 aa, synthetic construct
MNAPVFAQE

SEQ ID NO: 4179 - protein, 9 aa, synthetic construct
ISSFQWAIA

SEQ ID NO: 4180 - protein, 9 aa, synthetic construct
IMDLMQGCH

SEQ ID NO: 4181 - protein, 9 aa, synthetic construct
QYQQNGTQH

SEQ ID NO: 4182 - protein, 9 aa, synthetic construct
LYMHRGLYR

SEQ ID NO: 4183 - protein, 9 aa, synthetic construct
CGYLWSSFA

SEQ ID NO: 4184 - protein, 9 aa, synthetic construct
QSGESLSLM

SEQ ID NO: 4185 - protein, 9 aa, synthetic construct
QNGQMQACN

SEQ ID NO: 4186 - protein, 9 aa, synthetic construct
QFTSQSVQY

SEQ ID NO: 4187 - protein, 9 aa, synthetic construct
LCSQYFDRI

SEQ ID NO: 4188 - protein, 9 aa, synthetic construct
LIAPMFTDL

SEQ ID NO: 4189 - protein, 9 aa, synthetic construct
RYCEKNQGK

SEQ ID NO: 4190 - protein, 9 aa, synthetic construct
YSNSLWDSI

SEQ ID NO: 4191 - protein, 9 aa, synthetic construct
FYALTMSCQ

SEQ ID NO: 4192 - protein, 9 aa, synthetic construct
DTCYLQHAE

SEQ ID NO: 4193 - protein, 9 aa, synthetic construct
LSLLAYNHI

SEQ ID NO: 4194 - protein, 9 aa, synthetic construct
IWQLFNDCM

SEQ ID NO: 4195 - protein, 9 aa, synthetic construct
LIGMQPFCN

SEQ ID NO: 4196 - protein, 9 aa, synthetic construct
ESLSAYDKQ

SEQ ID NO: 4197 - protein, 9 aa, synthetic construct
SFNQCQSTC

SEQ ID NO: 4198 - protein, 9 aa, synthetic construct
RWSLIQQFE

SEQ ID NO: 4199 - protein, 9 aa, synthetic construct
LFSSWMCFY

SEQ ID NO: 4200 - protein, 9 aa, synthetic construct
GGISMHFFD

SEQ ID NO: 4201 - protein, 9 aa, synthetic construct
QIGTIQAHS

SEQ ID NO: 4202 - protein, 9 aa, synthetic construct
EWMYMQSGE

SEQ ID NO: 4203 - protein, 9 aa, synthetic construct
QFYQNSQMP

SEQ ID NO: 4204 - protein, 9 aa, synthetic construct
LATCSGQSI

SEQ ID NO: 4205 - protein, 9 aa, synthetic construct
LSFDSNAHL

SEQ ID NO: 4206 - protein, 9 aa, synthetic construct
SILFHQLIR

SEQ ID NO: 4207 - protein, 9 aa, synthetic construct
SWQFSKQYL

SEQ ID NO: 4208 - protein, 9 aa, synthetic construct
YALFELHND

SEQ ID NO: 4209 - protein, 9 aa, synthetic construct
IICHIHTMM

SEQ ID NO: 4210 - protein, 9 aa, synthetic construct
IFDPKIAWF

SEQ ID NO: 4211 - protein, 9 aa, synthetic construct
LGHTQACML

SEQ ID NO: 4212 - protein, 9 aa, synthetic construct
VMDSMHYFM

SEQ ID NO: 4213 - protein, 9 aa, synthetic construct
RWDQLMVGE

SEQ ID NO: 4214 - protein, 9 aa, synthetic construct
LFQFWKNCH

SEQ ID NO: 4215 - protein, 9 aa, synthetic construct
LYAFYMSSE

SEQ ID NO: 4216 - protein, 9 aa, synthetic construct
LFMSWQSTA

SEQ ID NO: 4217 - protein, 9 aa, synthetic construct
KYENYQMLR

SEQ ID NO: 4218 - protein, 9 aa, synthetic construct
DAILQSTHI

SEQ ID NO: 4219 - protein, 9 aa, synthetic construct
LFNFYTVDW

SEQ ID NO: 4220 - protein, 9 aa, synthetic construct
QAVSVTASI

SEQ ID NO: 4221 - protein, 9 aa, synthetic construct
NHVSFQQSM

SEQ ID NO: 4222 - protein, 9 aa, synthetic construct
FWASTGAYS

SEQ ID NO: 4223 - protein, 9 aa, synthetic construct
KSQSTVYQD

SEQ ID NO: 4224 - protein, 9 aa, synthetic construct
QTDHHHHCH

SEQ ID NO: 4225 - protein, 9 aa, synthetic construct
QSFPIQAPA

SEQ ID NO: 4226 - protein, 9 aa, synthetic construct
QMQQMSVMI

SEQ ID NO: 4227 - protein, 9 aa, synthetic construct
QIHIQFDHC

SEQ ID NO: 4228 - protein, 9 aa, synthetic construct
HYRGSKQWE

SEQ ID NO: 4229 - protein, 9 aa, synthetic construct
CFDFQFEHF

SEQ ID NO: 4230 - protein, 9 aa, synthetic construct
RASQMSGSM

SEQ ID NO: 4231 - protein, 9 aa, synthetic construct
QASILQKNH

SEQ ID NO: 4232 - protein, 9 aa, synthetic construct
QVSQQNQHF

SEQ ID NO: 4233 - protein, 9 aa, synthetic construct
QYQQCNFGC

SEQ ID NO: 4234 - protein, 9 aa, synthetic construct
ASFSNPAAT

SEQ ID NO: 4235 - protein, 9 aa, synthetic construct
EAMYNNSFC

SEQ ID NO: 4236 - protein, 9 aa, synthetic construct
DAYTSMSDW

SEQ ID NO: 4237 - protein, 9 aa, synthetic construct
GNANFGNLL

SEQ ID NO: 4238 - protein, 9 aa, synthetic construct
AACFKQLMQ

SEQ ID NO: 4239 - protein, 9 aa, synthetic construct
AACQWQSQR

SEQ ID NO: 4240 - protein, 9 aa, synthetic construct
AACSFAIQR

SEQ ID NO: 4241 - protein, 9 aa, synthetic construct
AADKPAHNP

SEQ ID NO: 4242 - protein, 9 aa, synthetic construct
AAIQAMACG

SEQ ID NO: 4243 - protein, 9 aa, synthetic construct
AALSINDQP

SEQ ID NO: 4244 - protein, 9 aa, synthetic construct
AAMPHQKRE

SEQ ID NO: 4245 - protein, 9 aa, synthetic construct
AAQYVMSLA

SEQ ID NO: 4246 - protein, 9 aa, synthetic construct
AAREGVKLE

SEQ ID NO: 4247 - protein, 9 aa, synthetic construct
ACATYQMTW

SEQ ID NO: 4248 - protein, 9 aa, synthetic construct
ADCSIIYPE

SEQ ID NO: 4249 - protein, 9 aa, synthetic construct
ADPRPAKGS

SEQ ID NO: 4250 - protein, 9 aa, synthetic construct
AFQRTYQFH

SEQ ID NO: 4251 - protein, 9 aa, synthetic construct
AGPFMVGFW

SEQ ID NO: 4252 - protein, 9 aa, synthetic construct
AGTWENMSG

SEQ ID NO: 4253 - protein, 9 aa, synthetic construct
AHILMGHNP

SEQ ID NO: 4254 - protein, 9 aa, synthetic construct
AHLWYHQCA

SEQ ID NO: 4255 - protein, 9 aa, synthetic construct
AIEQGLTMA

SEQ ID NO: 4256 - protein, 9 aa, synthetic construct
AIFCAHYSY

SEQ ID NO: 4257 - protein, 9 aa, synthetic construct
AKMYWDGHT

SEQ ID NO: 4258 - protein, 9 aa, synthetic construct
AMFPQLWAQ

SEQ ID NO: 4259 - protein, 9 aa, synthetic construct
AMNPKQMCF

SEQ ID NO: 4260 - protein, 9 aa, synthetic construct
ANIPQTAWN

SEQ ID NO: 4261 - protein, 9 aa, synthetic construct
APYCPTYIS

SEQ ID NO: 4262 - protein, 9 aa, synthetic construct
AQGCMHRWQ

SEQ ID NO: 4263 - protein, 9 aa, synthetic construct
AQIMLPSSK

SEQ ID NO: 4264 - protein, 9 aa, synthetic construct
AQSTARHIE

SEQ ID NO: 4265 - protein, 9 aa, synthetic construct
AQTEFGFME

SEQ ID NO: 4266 - protein, 9 aa, synthetic construct
ARCLSVIEQ

SEQ ID NO: 4267 - protein, 9 aa, synthetic construct
ARQLESFWT

SEQ ID NO: 4268 - protein, 9 aa, synthetic construct
ASFYQLLIP

SEQ ID NO: 4269 - protein, 9 aa, synthetic construct
ASIVLRDSF

SEQ ID NO: 4270 - protein, 9 aa, synthetic construct
ASNPLNCPN

SEQ ID NO: 4271 - protein, 9 aa, synthetic construct
ASRFEDLWE

SEQ ID NO: 4272 - protein, 9 aa, synthetic construct
ASTEWDMHN

SEQ ID NO: 4273 - protein, 9 aa, synthetic construct
ASVELMKVC

SEQ ID NO: 4274 - protein, 9 aa, synthetic construct
ASYLWCTMP

SEQ ID NO: 4275 - protein, 9 aa, synthetic construct
ATDRIRTMM

SEQ ID NO: 4276 - protein, 9 aa, synthetic construct
ATELGKDSG

SEQ ID NO: 4277 - protein, 9 aa, synthetic construct
ATGRAAYHE

SEQ ID NO: 4278 - protein, 9 aa, synthetic construct
ATIWPVESW

SEQ ID NO: 4279 - protein, 9 aa, synthetic construct
ATLCTQRGS

SEQ ID NO: 4280 - protein, 9 aa, synthetic construct
ATLFYNAFW

SEQ ID NO: 4281 - protein, 9 aa, synthetic construct
ATTAVGDAL

SEQ ID NO: 4282 - protein, 9 aa, synthetic construct
ATWISHNAS

SEQ ID NO: 4283 - protein, 9 aa, synthetic construct
AVALSFVSS

SEQ ID NO: 4284 - protein, 9 aa, synthetic construct
AVCEYLRMD

SEQ ID NO: 4285 - protein, 9 aa, synthetic construct
AVTQWMLYA

SEQ ID NO: 4286 - protein, 9 aa, synthetic construct
AYPERLYSD

SEQ ID NO: 4287 - protein, 9 aa, synthetic construct
AYRQMCIER

SEQ ID NO: 4288 - protein, 9 aa, synthetic construct
CACKVSMSG

SEQ ID NO: 4289 - protein, 9 aa, synthetic construct
CACSIGHHR

SEQ ID NO: 4290 - protein, 9 aa, synthetic construct
CAFQMYDSP

SEQ ID NO: 4291 - protein, 9 aa, synthetic construct
CAKQYDKGI

SEQ ID NO: 4292 - protein, 9 aa, synthetic construct
CAMLLQAVQ

SEQ ID NO: 4293 - protein, 9 aa, synthetic construct
CAQPQHNWC

SEQ ID NO: 4294 - protein, 9 aa, synthetic construct
CATFVNKLS

SEQ ID NO: 4295 - protein, 9 aa, synthetic construct
CAVKFHAYD

SEQ ID NO: 4296 - protein, 9 aa, synthetic construct
CDGELGRKC

SEQ ID NO: 4297 - protein, 9 aa, synthetic construct
CDGRGIPGC

SEQ ID NO: 4298 - protein, 9 aa, synthetic construct
CDGSCKYYQ

SEQ ID NO: 4299 - protein, 9 aa, synthetic construct
CDWMMANLG

SEQ ID NO: 4300 - protein, 9 aa, synthetic construct
CEPEGWIRA

SEQ ID NO: 4301 - protein, 9 aa, synthetic construct
CEPFNINWW

SEQ ID NO: 4302 - protein, 9 aa, synthetic construct
CESHEYRGH

SEQ ID NO: 4303 - protein, 9 aa, synthetic construct
CFMPMMYYE

SEQ ID NO: 4304 - protein, 9 aa, synthetic construct
CFRLHEMHQ

SEQ ID NO: 4305 - protein, 9 aa, synthetic construct
CFRNILDDS

SEQ ID NO: 4306 - protein, 9 aa, synthetic construct
CGRCNWRGY

SEQ ID NO: 4307 - protein, 9 aa, synthetic construct
CHGYTWERP

SEQ ID NO: 4308 - protein, 9 aa, synthetic construct
CHWFRCSCA

SEQ ID NO: 4309 - protein, 9 aa, synthetic construct
CIAFVKQCC

SEQ ID NO: 4310 - protein, 9 aa, synthetic construct
CIARTDYQP

SEQ ID NO: 4311 - protein, 9 aa, synthetic construct
CIGKWPISR

SEQ ID NO: 4312 - protein, 9 aa, synthetic construct
CIHRLIEDN

SEQ ID NO: 4313 - protein, 9 aa, synthetic construct
CIMSMMWSQ

SEQ ID NO: 4314 - protein, 9 aa, synthetic construct
CIMYRSEAS

SEQ ID NO: 4315 - protein, 9 aa, synthetic construct
CIQATKAYC

SEQ ID NO: 4316 - protein, 9 aa, synthetic construct
CIRHAQDCY

SEQ ID NO: 4317 - protein, 9 aa, synthetic construct
CITHQQMAV

SEQ ID NO: 4318 - protein, 9 aa, synthetic construct
CKEWYVRDR

SEQ ID NO: 4319 - protein, 9 aa, synthetic construct
CKPANWVRY

SEQ ID NO: 4320 - protein, 9 aa, synthetic construct
CKTHIWGFP

SEQ ID NO: 4321 - protein, 9 aa, synthetic construct
CKVIVNIGA

SEQ ID NO: 4322 - protein, 9 aa, synthetic construct
CKWIPWQCD

SEQ ID NO: 4323 - protein, 9 aa, synthetic construct
CKWPCTWNS

SEQ ID NO: 4324 - protein, 9 aa, synthetic construct
CKYCCDSHE

SEQ ID NO: 4325 - protein, 9 aa, synthetic construct
CLMEKISDF

SEQ ID NO: 4326 - protein, 9 aa, synthetic construct
CLPFFINRW

SEQ ID NO: 4327 - protein, 9 aa, synthetic construct
CMESYSISE

SEQ ID NO: 4328 - protein, 9 aa, synthetic construct
CMINLFDAC

SEQ ID NO: 4329 - protein, 9 aa, synthetic construct
CMNESGQFH

SEQ ID NO: 4330 - protein, 9 aa, synthetic construct
CMQRPHTAP

SEQ ID NO: 4331 - protein, 9 aa, synthetic construct
CMSQFHLER

SEQ ID NO: 4332 - protein, 9 aa, synthetic construct
CNETPWHKG

SEQ ID NO: 4333 - protein, 9 aa, synthetic construct
CPAILNVAC

SEQ ID NO: 4334 - protein, 9 aa, synthetic construct
CPKWSNHDQ

SEQ ID NO: 4335 - protein, 9 aa, synthetic construct
CPMKHIQDR

SEQ ID NO: 4336 - protein, 9 aa, synthetic construct
CPQQDDWPG

SEQ ID NO: 4337 - protein, 9 aa, synthetic construct
CPWFGFLGW

SEQ ID NO: 4338 - protein, 9 aa, synthetic construct
CQATFSRAY

SEQ ID NO: 4339 - protein, 9 aa, synthetic construct
CQCNWWGRP

SEQ ID NO: 4340 - protein, 9 aa, synthetic construct
CQQRYGHGK

SEQ ID NO: 4341 - protein, 9 aa, synthetic construct
CRCPLSIMS

SEQ ID NO: 4342 - protein, 9 aa, synthetic construct
CSDLWRIPF

SEQ ID NO: 4343 - protein, 9 aa, synthetic construct
CSHKKEQYD

SEQ ID NO: 4344 - protein, 9 aa, synthetic construct
CSICHYDHA

SEQ ID NO: 4345 - protein, 9 aa, synthetic construct
CSIYQQMFQ

SEQ ID NO: 4346 - protein, 9 aa, synthetic construct
CSMSTQRGA

SEQ ID NO: 4347 - protein, 9 aa, synthetic construct
CSSLFMFNT

SEQ ID NO: 4348 - protein, 9 aa, synthetic construct
CSSNWPMGI

SEQ ID NO: 4349 - protein, 9 aa, synthetic construct
CSSYLVTAN

SEQ ID NO: 4350 - protein, 9 aa, synthetic construct
CSTARGYDL

SEQ ID NO: 4351 - protein, 9 aa, synthetic construct
CSTESSNSM

SEQ ID NO: 4352 - protein, 9 aa, synthetic construct
CSTTYGRKE

SEQ ID NO: 4353 - protein, 9 aa, synthetic construct
CSWYTHAGA

SEQ ID NO: 4354 - protein, 9 aa, synthetic construct
CTFMVYSQG

SEQ ID NO: 4355 - protein, 9 aa, synthetic construct
CTFQSTSAW

SEQ ID NO: 4356 - protein, 9 aa, synthetic construct
CTKTFDRTE

SEQ ID NO: 4357 - protein, 9 aa, synthetic construct
CTNIQSVFH

SEQ ID NO: 4358 - protein, 9 aa, synthetic construct
CTPTQWGSA

SEQ ID NO: 4359 - protein, 9 aa, synthetic construct
CVATKSRML

SEQ ID NO: 4360 - protein, 9 aa, synthetic construct
CVAVPLSMS

SEQ ID NO: 4361 - protein, 9 aa, synthetic construct
CVGFWTQMN

SEQ ID NO: 4362 - protein, 9 aa, synthetic construct
CVGTVFHTA

SEQ ID NO: 4363 - protein, 9 aa, synthetic construct
CVHIKVDGT

SEQ ID NO: 4364 - protein, 9 aa, synthetic construct
CVHVKEQSQ

SEQ ID NO: 4365 - protein, 9 aa, synthetic construct
CVIYNDMQI

SEQ ID NO: 4366 - protein, 9 aa, synthetic construct
CVLFRHVDQ

SEQ ID NO: 4367 - protein, 9 aa, synthetic construct
CVMPLGMAA

SEQ ID NO: 4368 - protein, 9 aa, synthetic construct
CVNMKYVDS

SEQ ID NO: 4369 - protein, 9 aa, synthetic construct
CVQSEWGSK

SEQ ID NO: 4370 - protein, 9 aa, synthetic construct
CVQWQMNDA

SEQ ID NO: 4371 - protein, 9 aa, synthetic construct
CVSLHSISM

SEQ ID NO: 4372 - protein, 9 aa, synthetic construct
CVYQFDFTQ

SEQ ID NO: 4373 - protein, 9 aa, synthetic construct
CWELLTWQW

SEQ ID NO: 4374 - protein, 9 aa, synthetic construct
CWFDFMITE

SEQ ID NO: 4375 - protein, 9 aa, synthetic construct
CWGYTPDWN

SEQ ID NO: 4376 - protein, 9 aa, synthetic construct
CYAPKFIGD

SEQ ID NO: 4377 - protein, 9 aa, synthetic construct
CYIDYRMSY

SEQ ID NO: 4378 - protein, 9 aa, synthetic construct
CYLEIPNNF

SEQ ID NO: 4379 - protein, 9 aa, synthetic construct
CYNLFNSMY

SEQ ID NO: 4380 - protein, 9 aa, synthetic construct
CYSLRPDGP

SEQ ID NO: 4381 - protein, 9 aa, synthetic construct
DAKAHIFSF

SEQ ID NO: 4382 - protein, 9 aa, synthetic construct
DASECKWYN

SEQ ID NO: 4383 - protein, 9 aa, synthetic construct
DDLIPINPW

SEQ ID NO: 4384 - protein, 9 aa, synthetic construct
DDVAEKQCC

SEQ ID NO: 4385 - protein, 9 aa, synthetic construct
DEHTIDVMQ

SEQ ID NO: 4386 - protein, 9 aa, synthetic construct
DENGTWPHG

SEQ ID NO: 4387 - protein, 9 aa, synthetic construct
DEPENMYSS

SEQ ID NO: 4388 - protein, 9 aa, synthetic construct
DFFWPRPKA

SEQ ID NO: 4389 - protein, 9 aa, synthetic construct
DFPRPENHW

SEQ ID NO: 4390 - protein, 9 aa, synthetic construct
DHECVHGSG

SEQ ID NO: 4391 - protein, 9 aa, synthetic construct
DHELKGACS

SEQ ID NO: 4392 - protein, 9 aa, synthetic construct
DHLWFSSPG

SEQ ID NO: 4393 - protein, 9 aa, synthetic construct
DHNPIMMWC

SEQ ID NO: 4394 - protein, 9 aa, synthetic construct
DHVECWPQG

SEQ ID NO: 4395 - protein, 9 aa, synthetic construct
DIYPWVCYY

SEQ ID NO: 4396 - protein, 9 aa, synthetic construct
DKCHWASEG

SEQ ID NO: 4397 - protein, 9 aa, synthetic construct
DLGNDRWRF

SEQ ID NO: 4398 - protein, 9 aa, synthetic construct
DMHSYNNAK

SEQ ID NO: 4399 - protein, 9 aa, synthetic construct
DMKGRQDGA

SEQ ID NO: 4400 - protein, 9 aa, synthetic construct
DQSPLRTQS

SEQ ID NO: 4401 - protein, 9 aa, synthetic construct
DRMMYARNG

SEQ ID NO: 4402 - protein, 9 aa, synthetic construct
DRNQLYSSF

SEQ ID NO: 4403 - protein, 9 aa, synthetic construct
DSACAGWGL

SEQ ID NO: 4404 - protein, 9 aa, synthetic construct
DSDYVLVDY

SEQ ID NO: 4405 - protein, 9 aa, synthetic construct
DSIAKGVAH

SEQ ID NO: 4406 - protein, 9 aa, synthetic construct
DSPFGWFNC

SEQ ID NO: 4407 - protein, 9 aa, synthetic construct
DSPWSKWQP

SEQ ID NO: 4408 - protein, 9 aa, synthetic construct
DTKDYPKQS

SEQ ID NO: 4409 - protein, 9 aa, synthetic construct
DTKPVEEVK

SEQ ID NO: 4410 - protein, 9 aa, synthetic construct
DTLHKLSDC

SEQ ID NO: 4411 - protein, 9 aa, synthetic construct
DTRCYGEMF

SEQ ID NO: 4412 - protein, 9 aa, synthetic construct
DTVQMLCQY

SEQ ID NO: 4413 - protein, 9 aa, synthetic construct
DVHCICRYD

SEQ ID NO: 4414 - protein, 9 aa, synthetic construct
DVHKWSCAK

SEQ ID NO: 4415 - protein, 9 aa, synthetic construct
DVICRHHGM

SEQ ID NO: 4416 - protein, 9 aa, synthetic construct
DVILSQEYN

SEQ ID NO: 4417 - protein, 9 aa, synthetic construct
DVLKVRIQE

SEQ ID NO: 4418 - protein, 9 aa, synthetic construct
DVRIPCCQH

SEQ ID NO: 4419 - protein, 9 aa, synthetic construct
DVTMYAAWS

SEQ ID NO: 4420 - protein, 9 aa, synthetic construct
DVVLCNQWR

SEQ ID NO: 4421 - protein, 9 aa, synthetic construct
DVWNDLNSM

SEQ ID NO: 4422 - protein, 9 aa, synthetic construct
DWKLTYPQG

SEQ ID NO: 4423 - protein, 9 aa, synthetic construct
DWMVVRKEG

SEQ ID NO: 4424 - protein, 9 aa, synthetic construct
DWPHIMFNY

SEQ ID NO: 4425 - protein, 9 aa, synthetic construct
DYTFKRYVC

SEQ ID NO: 4426 - protein, 9 aa, synthetic construct
EAEQCMIGQ

SEQ ID NO: 4427 - protein, 9 aa, synthetic construct
EAGWFNHST

SEQ ID NO: 4428 - protein, 9 aa, synthetic construct
EAHDLAGNM

SEQ ID NO: 4429 - protein, 9 aa, synthetic construct
EAHKMISTR

SEQ ID NO: 4430 - protein, 9 aa, synthetic construct
EAKASAHTC

SEQ ID NO: 4431 - protein, 9 aa, synthetic construct
EAQLYPDML

SEQ ID NO: 4432 - protein, 9 aa, synthetic construct
EASCMSIWT

SEQ ID NO: 4433 - protein, 9 aa, synthetic construct
ECGHIFYPA

SEQ ID NO: 4434 - protein, 9 aa, synthetic construct
ECIDVMQNR

SEQ ID NO: 4435 - protein, 9 aa, synthetic construct
ECQLVKTVP

SEQ ID NO: 4436 - protein, 9 aa, synthetic construct
ECTVICSSS

SEQ ID NO: 4437 - protein, 9 aa, synthetic construct
ECVGGNIWG

SEQ ID NO: 4438 - protein, 9 aa, synthetic construct
EERKCNLGC

SEQ ID NO: 4439 - protein, 9 aa, synthetic construct
EFRNYWSPY

SEQ ID NO: 4440 - protein, 9 aa, synthetic construct
EFWSVKNHD

SEQ ID NO: 4441 - protein, 9 aa, synthetic construct
EHHICSKSA

SEQ ID NO: 4442 - protein, 9 aa, synthetic construct
EHMKLFLSE

SEQ ID NO: 4443 - protein, 9 aa, synthetic construct
EIATHITFQ

SEQ ID NO: 4444 - protein, 9 aa, synthetic construct
EIGMVMDMN

SEQ ID NO: 4445 - protein, 9 aa, synthetic construct
EIMALDSPC

SEQ ID NO: 4446 - protein, 9 aa, synthetic construct
EKEWGTPMW

SEQ ID NO: 4447 - protein, 9 aa, synthetic construct
EKFPPHGDV

SEQ ID NO: 4448 - protein, 9 aa, synthetic construct
ELKWQVAQF

SEQ ID NO: 4449 - protein, 9 aa, synthetic construct
EMGPYPYPS

SEQ ID NO: 4450 - protein, 9 aa, synthetic construct
EMKIDEHWP

SEQ ID NO: 4451 - protein, 9 aa, synthetic construct
EMLLQPMYG

SEQ ID NO: 4452 - protein, 9 aa, synthetic construct
ENCVISVHH

SEQ ID NO: 4453 - protein, 9 aa, synthetic construct
ENGFIHKQS

SEQ ID NO: 4454 - protein, 9 aa, synthetic construct
ENQPYWQVY

SEQ ID NO: 4455 - protein, 9 aa, synthetic construct
EPEGIYQPM

SEQ ID NO: 4456 - protein, 9 aa, synthetic construct
EQDDYMIPP

SEQ ID NO: 4457 - protein, 9 aa, synthetic construct
EQESWEMGP

SEQ ID NO: 4458 - protein, 9 aa, synthetic construct
ESESANHEG

SEQ ID NO: 4459 - protein, 9 aa, synthetic construct
ESFAKHDQN

SEQ ID NO: 4460 - protein, 9 aa, synthetic construct
ESGSQSGQA

SEQ ID NO: 4461 - protein, 9 aa, synthetic construct
ESSQVNWHR

SEQ ID NO: 4462 - protein, 9 aa, synthetic construct
ESTGESTLG

SEQ ID NO: 4463 - protein, 9 aa, synthetic construct
ETQPHADYE

SEQ ID NO: 4464 - protein, 9 aa, synthetic construct
ETTKWEAQH

SEQ ID NO: 4465 - protein, 9 aa, synthetic construct
EVGCSWMWG

SEQ ID NO: 4466 - protein, 9 aa, synthetic construct
EVGNYPRIP

SEQ ID NO: 4467 - protein, 9 aa, synthetic construct
EVGRQQWMD

SEQ ID NO: 4468 - protein, 9 aa, synthetic construct
EVKADIAQM

SEQ ID NO: 4469 - protein, 9 aa, synthetic construct
EVKSANATW

SEQ ID NO: 4470 - protein, 9 aa, synthetic construct
EVPAQTMQS

SEQ ID NO: 4471 - protein, 9 aa, synthetic construct
EVQKRLVAE

SEQ ID NO: 4472 - protein, 9 aa, synthetic construct
EVTCESKIE

SEQ ID NO: 4473 - protein, 9 aa, synthetic construct
FCDLAHHYE

SEQ ID NO: 4474 - protein, 9 aa, synthetic construct
FCRDFVKDM

SEQ ID NO: 4475 - protein, 9 aa, synthetic construct
FDKWPKPQC

SEQ ID NO: 4476 - protein, 9 aa, synthetic construct
FDPADVQKW

SEQ ID NO: 4477 - protein, 9 aa, synthetic construct
FFESWQYPY

SEQ ID NO: 4478 - protein, 9 aa, synthetic construct
FHWREPYVE

SEQ ID NO: 4479 - protein, 9 aa, synthetic construct
FKRHEIPEY

SEQ ID NO: 4480 - protein, 9 aa, synthetic construct
FMWITISNY

SEQ ID NO: 4481 - protein, 9 aa, synthetic construct
FRQPYVWDK

SEQ ID NO: 4482 - protein, 9 aa, synthetic construct
FSCSLYRHG

SEQ ID NO: 4483 - protein, 9 aa, synthetic construct
FTTSQTLAE

SEQ ID NO: 4484 - protein, 9 aa, synthetic construct
FVGSRNCID

SEQ ID NO: 4485 - protein, 9 aa, synthetic construct
FYFQNIHPW

SEQ ID NO: 4486 - protein, 9 aa, synthetic construct
GCYQSNVIP

SEQ ID NO: 4487 - protein, 9 aa, synthetic construct
GDCPYSMQP

SEQ ID NO: 4488 - protein, 9 aa, synthetic construct
GDGHGMWKM

SEQ ID NO: 4489 - protein, 9 aa, synthetic construct
GDPKSKHDC

SEQ ID NO: 4490 - protein, 9 aa, synthetic construct
GEHHCKFPM

SEQ ID NO: 4491 - protein, 9 aa, synthetic construct
GEKWELYPM

SEQ ID NO: 4492 - protein, 9 aa, synthetic construct
GEPRPNYVD

SEQ ID NO: 4493 - protein, 9 aa, synthetic construct
GFEFMLNCP

SEQ ID NO: 4494 - protein, 9 aa, synthetic construct
GGDRWLGYW

SEQ ID NO: 4495 - protein, 9 aa, synthetic construct
GGEDEKPGC

SEQ ID NO: 4496 - protein, 9 aa, synthetic construct
GGHFGHITW

SEQ ID NO: 4497 - protein, 9 aa, synthetic construct
GHDFTNQDR

SEQ ID NO: 4498 - protein, 9 aa, synthetic construct
GHFLDRWRD

SEQ ID NO: 4499 - protein, 9 aa, synthetic construct
GKFCMPRNY

SEQ ID NO: 4500 - protein, 9 aa, synthetic construct
GKKCGWPND

SEQ ID NO: 4501 - protein, 9 aa, synthetic construct
GKSDMDCVE

SEQ ID NO: 4502 - protein, 9 aa, synthetic construct
GKWQQQMVL

SEQ ID NO: 4503 - protein, 9 aa, synthetic construct
GNPNCCLTG

SEQ ID NO: 4504 - protein, 9 aa, synthetic construct
GPCCKWCTE

SEQ ID NO: 4505 - protein, 9 aa, synthetic construct
GQNHVIVGA

SEQ ID NO: 4506 - protein, 9 aa, synthetic construct
GRADCSAHP

SEQ ID NO: 4507 - protein, 9 aa, synthetic construct
GSAQNMFGW

SEQ ID NO: 4508 - protein, 9 aa, synthetic construct
GSCLKIAQE

SEQ ID NO: 4509 - protein, 9 aa, synthetic construct
GSGLHMGYK

SEQ ID NO: 4510 - protein, 9 aa, synthetic construct
GSRDSPISF

SEQ ID NO: 4511 - protein, 9 aa, synthetic construct
GTAPPGTYS

SEQ ID NO: 4512 - protein, 9 aa, synthetic construct
GTATMMHTH

SEQ ID NO: 4513 - protein, 9 aa, synthetic construct
GVDLDNDRE

SEQ ID NO: 4514 - protein, 9 aa, synthetic construct
GVFPMLMHS

SEQ ID NO: 4515 - protein, 9 aa, synthetic construct
GVGWDSCHN

SEQ ID NO: 4516 - protein, 9 aa, synthetic construct
GVIYRHHDP

SEQ ID NO: 4517 - protein, 9 aa, synthetic construct
GVNFEDGAY

SEQ ID NO: 4518 - protein, 9 aa, synthetic construct
GVTERFCPD

SEQ ID NO: 4519 - protein, 9 aa, synthetic construct
GVWSKNTPF

SEQ ID NO: 4520 - protein, 9 aa, synthetic construct
GWMSHEYPF

SEQ ID NO: 4521 - protein, 9 aa, synthetic construct
GWWPGKPMD

SEQ ID NO: 4522 - protein, 9 aa, synthetic construct
GYPRDPHET

SEQ ID NO: 4523 - protein, 9 aa, synthetic construct
HAAMSGEGM

SEQ ID NO: 4524 - protein, 9 aa, synthetic construct
HAEWACSGR

SEQ ID NO: 4525 - protein, 9 aa, synthetic construct
HASYMCGLW

SEQ ID NO: 4526 - protein, 9 aa, synthetic construct
HCEAVLVHG

SEQ ID NO: 4527 - protein, 9 aa, synthetic construct
HDIRNVRML

SEQ ID NO: 4528 - protein, 9 aa, synthetic construct
HDRWPKNCM

SEQ ID NO: 4529 - protein, 9 aa, synthetic construct
HEPFRISGE

SEQ ID NO: 4530 - protein, 9 aa, synthetic construct
HHWLGDCNS

SEQ ID NO: 4531 - protein, 9 aa, synthetic construct
HIGTQYRQY

SEQ ID NO: 4532 - protein, 9 aa, synthetic construct
HMRKTLIWK

SEQ ID NO: 4533 - protein, 9 aa, synthetic construct
HPQFKSHEY

SEQ ID NO: 4534 - protein, 9 aa, synthetic construct
HQYWMIPDG

SEQ ID NO: 4535 - protein, 9 aa, synthetic construct
HSEPKLDIP

SEQ ID NO: 4536 - protein, 9 aa, synthetic construct
HTAQLMAHE

SEQ ID NO: 4537 - protein, 9 aa, synthetic construct
HTIAANMVA

SEQ ID NO: 4538 - protein, 9 aa, synthetic construct
HTPTDAHVG

SEQ ID NO: 4539 - protein, 9 aa, synthetic construct
HTTPAAFHN

SEQ ID NO: 4540 - protein, 9 aa, synthetic construct
HVDPGFASL

SEQ ID NO: 4541 - protein, 9 aa, synthetic construct
HWPFPWMRI

SEQ ID NO: 4542 - protein, 9 aa, synthetic construct
IAFMKSVEG

SEQ ID NO: 4543 - protein, 9 aa, synthetic construct
IAMAYKGQI

SEQ ID NO: 4544 - protein, 9 aa, synthetic construct
IAYYEKMWS

SEQ ID NO: 4545 - protein, 9 aa, synthetic construct
ICMSRTQMK

SEQ ID NO: 4546 - protein, 9 aa, synthetic construct
IDPQGWLTH

SEQ ID NO: 4547 - protein, 9 aa, synthetic construct
IDSFGELRE

SEQ ID NO: 4548 - protein, 9 aa, synthetic construct
IGVRYAVQE

SEQ ID NO: 4549 - protein, 9 aa, synthetic construct
IIRVQVDGS

SEQ ID NO: 4550 - protein, 9 aa, synthetic construct
IMCKCPVWC

SEQ ID NO: 4551 - protein, 9 aa, synthetic construct
IMEIVGIGN

SEQ ID NO: 4552 - protein, 9 aa, synthetic construct
INSRTNSMC

SEQ ID NO: 4553 - protein, 9 aa, synthetic construct
IPWPPVKGD

SEQ ID NO: 4554 - protein, 9 aa, synthetic construct
IQKMWDHFQ

SEQ ID NO: 4555 - protein, 9 aa, synthetic construct
IQRTMEANG

SEQ ID NO: 4556 - protein, 9 aa, synthetic construct
IQVVKMAHG

SEQ ID NO: 4557 - protein, 9 aa, synthetic construct
ISADQSMQD

SEQ ID NO: 4558 - protein, 9 aa, synthetic construct
ISAWQDFDA

SEQ ID NO: 4559 - protein, 9 aa, synthetic construct
ISEIHYTQC

SEQ ID NO: 4560 - protein, 9 aa, synthetic construct
ITGGFNKDK

SEQ ID NO: 4561 - protein, 9 aa, synthetic construct
ITNWFQQDK

SEQ ID NO: 4562 - protein, 9 aa, synthetic construct
ITQVWCSDG

SEQ ID NO: 4563 - protein, 9 aa, synthetic construct
ITTCYPNQT

SEQ ID NO: 4564 - protein, 9 aa, synthetic construct
IVCQSHVMN

SEQ ID NO: 4565 - protein, 9 aa, synthetic construct
IVTQRHYQI

SEQ ID NO: 4566 - protein, 9 aa, synthetic construct
IYRPVDSFR

SEQ ID NO: 4567 - protein, 9 aa, synthetic construct
KACDSKESW

SEQ ID NO: 4568 - protein, 9 aa, synthetic construct
KANEDLKQF

SEQ ID NO: 4569 - protein, 9 aa, synthetic construct
KCDYEHYFA

SEQ ID NO: 4570 - protein, 9 aa, synthetic construct
KCKCPKMPQ

SEQ ID NO: 4571 - protein, 9 aa, synthetic construct
KEHVYGMCP

SEQ ID NO: 4572 - protein, 9 aa, synthetic construct
KFMSQEFGP

SEQ ID NO: 4573 - protein, 9 aa, synthetic construct
KGCLLDSDH

SEQ ID NO: 4574 - protein, 9 aa, synthetic construct
KGMDTTIVP

SEQ ID NO: 4575 - protein, 9 aa, synthetic construct
KHERDPPQY

SEQ ID NO: 4576 - protein, 9 aa, synthetic construct
KKFQRALTC

SEQ ID NO: 4577 - protein, 9 aa, synthetic construct
KMEPVELFT

SEQ ID NO: 4578 - protein, 9 aa, synthetic construct
KMQFIDACA

SEQ ID NO: 4579 - protein, 9 aa, synthetic construct
KMRDGTEQK

SEQ ID NO: 4580 - protein, 9 aa, synthetic construct
KNALYVSYQ

SEQ ID NO: 4581 - protein, 9 aa, synthetic construct
KPPWINYPR

SEQ ID NO: 4582 - protein, 9 aa, synthetic construct
KQAQALEYF

SEQ ID NO: 4583 - protein, 9 aa, synthetic construct
KQDCYFWHT

SEQ ID NO: 4584 - protein, 9 aa, synthetic construct
KSWDTIQYT

SEQ ID NO: 4585 - protein, 9 aa, synthetic construct
KSYICEDFF

SEQ ID NO: 4586 - protein, 9 aa, synthetic construct
KTEWLMWYN

SEQ ID NO: 4587 - protein, 9 aa, synthetic construct
KTVIMEDFK

SEQ ID NO: 4588 - protein, 9 aa, synthetic construct
KVTDCNQSG

SEQ ID NO: 4589 - protein, 9 aa, synthetic construct
KWMHYDSIC

SEQ ID NO: 4590 - protein, 9 aa, synthetic construct
LACQIDRFH

SEQ ID NO: 4591 - protein, 9 aa, synthetic construct
LAELYLNMR

SEQ ID NO: 4592 - protein, 9 aa, synthetic construct
LAGNQMDAD

SEQ ID NO: 4593 - protein, 9 aa, synthetic construct
LAHGRCFHE

SEQ ID NO: 4594 - protein, 9 aa, synthetic construct
LALSANLGG

SEQ ID NO: 4595 - protein, 9 aa, synthetic construct
LAPPITWTD

SEQ ID NO: 4596 - protein, 9 aa, synthetic construct
LASLAMAKA

SEQ ID NO: 4597 - protein, 9 aa, synthetic construct
LATHALMAH

SEQ ID NO: 4598 - protein, 9 aa, synthetic construct
LAWSQLLTP

SEQ ID NO: 4599 - protein, 9 aa, synthetic construct
LCEPIAIRD

SEQ ID NO: 4600 - protein, 9 aa, synthetic construct
LCIRSLANG

SEQ ID NO: 4601 - protein, 9 aa, synthetic construct
LCMRYGSKA

SEQ ID NO: 4602 - protein, 9 aa, synthetic construct
LDRPRFTDW

SEQ ID NO: 4603 - protein, 9 aa, synthetic construct
LGQPVDDYS

SEQ ID NO: 4604 - protein, 9 aa, synthetic construct
LHNLYEMSP

SEQ ID NO: 4605 - protein, 9 aa, synthetic construct
LIEPDSFRG

SEQ ID NO: 4606 - protein, 9 aa, synthetic construct
LKAEKNTMS

SEQ ID NO: 4607 - protein, 9 aa, synthetic construct
LMVDVQRCK

SEQ ID NO: 4608 - protein, 9 aa, synthetic construct
LMYCRYCPS

SEQ ID NO: 4609 - protein, 9 aa, synthetic construct
LNAEWDEWT

SEQ ID NO: 4610 - protein, 9 aa, synthetic construct
LNFLWAMLW

SEQ ID NO: 4611 - protein, 9 aa, synthetic construct
LPCSLLRGD

SEQ ID NO: 4612 - protein, 9 aa, synthetic construct
LPIPPVPEY

SEQ ID NO: 4613 - protein, 9 aa, synthetic construct
LPRLNFESK

SEQ ID NO: 4614 - protein, 9 aa, synthetic construct
LPSAVVMHE

SEQ ID NO: 4615 - protein, 9 aa, synthetic construct
LQGLSWLFP

SEQ ID NO: 4616 - protein, 9 aa, synthetic construct
LQNLFSYQE

SEQ ID NO: 4617 - protein, 9 aa, synthetic construct
LQQQTHWYG

SEQ ID NO: 4618 - protein, 9 aa, synthetic construct
LRSFIDTMD

SEQ ID NO: 4619 - protein, 9 aa, synthetic construct
LSFCLGHND

SEQ ID NO: 4620 - protein, 9 aa, synthetic construct
LSMIPMAQW

SEQ ID NO: 4621 - protein, 9 aa, synthetic construct
LSYWSGNAA

SEQ ID NO: 4622 - protein, 9 aa, synthetic construct
LTAPMEEDN

SEQ ID NO: 4623 - protein, 9 aa, synthetic construct
LTCLQDGDA

SEQ ID NO: 4624 - protein, 9 aa, synthetic construct
LTCQYQGGQ

SEQ ID NO: 4625 - protein, 9 aa, synthetic construct
LTMGHTMQA

SEQ ID NO: 4626 - protein, 9 aa, synthetic construct
LVHEPGAVT

SEQ ID NO: 4627 - protein, 9 aa, synthetic construct
LVHQKWECK

SEQ ID NO: 4628 - protein, 9 aa, synthetic construct
LVHREECQI

SEQ ID NO: 4629 - protein, 9 aa, synthetic construct
LVHTIMMGS

SEQ ID NO: 4630 - protein, 9 aa, synthetic construct
LYHAYSSGF

SEQ ID NO: 4631 - protein, 9 aa, synthetic construct
MAANVSEEK

SEQ ID NO: 4632 - protein, 9 aa, synthetic construct
MACAFGTNF

SEQ ID NO: 4633 - protein, 9 aa, synthetic construct
MACWKNATE

SEQ ID NO: 4634 - protein, 9 aa, synthetic construct
MAQIGPLHH

SEQ ID NO: 4635 - protein, 9 aa, synthetic construct
MASTCTQQD

SEQ ID NO: 4636 - protein, 9 aa, synthetic construct
MATRLFDSG

SEQ ID NO: 4637 - protein, 9 aa, synthetic construct
MDFNIDWHT

SEQ ID NO: 4638 - protein, 9 aa, synthetic construct
MEASNGFGL

SEQ ID NO: 4639 - protein, 9 aa, synthetic construct
MEDSCRPGF

SEQ ID NO: 4640 - protein, 9 aa, synthetic construct
MHMPCRVGK

SEQ ID NO: 4641 - protein, 9 aa, synthetic construct
MIEENEWFG

SEQ ID NO: 4642 - protein, 9 aa, synthetic construct
MILPIHHQQ

SEQ ID NO: 4643 - protein, 9 aa, synthetic construct
MKQWPVFPS

SEQ ID NO: 4644 - protein, 9 aa, synthetic construct
MLGVSTWEW

SEQ ID NO: 4645 - protein, 9 aa, synthetic construct
MMRIDGLGP

SEQ ID NO: 4646 - protein, 9 aa, synthetic construct
MNATQMYGQ

SEQ ID NO: 4647 - protein, 9 aa, synthetic construct
MNGYYHVMN

SEQ ID NO: 4648 - protein, 9 aa, synthetic construct
MNLGKNMWN

SEQ ID NO: 4649 - protein, 9 aa, synthetic construct
MNMEYCQFG

SEQ ID NO: 4650 - protein, 9 aa, synthetic construct
MPRLTTYTW

SEQ ID NO: 4651 - protein, 9 aa, synthetic construct
MQGFFTRGF

SEQ ID NO: 4652 - protein, 9 aa, synthetic construct
MQNKQASTP

SEQ ID NO: 4653 - protein, 9 aa, synthetic construct
MSDLWPFSY

SEQ ID NO: 4654 - protein, 9 aa, synthetic construct
MTACHTMGR

SEQ ID NO: 4655 - protein, 9 aa, synthetic construct
MTCDFSAAE

SEQ ID NO: 4656 - protein, 9 aa, synthetic construct
MTCHFQHMH

SEQ ID NO: 4657 - protein, 9 aa, synthetic construct
MTCNWGLNG

SEQ ID NO: 4658 - protein, 9 aa, synthetic construct
MTKPGIPNF

SEQ ID NO: 4659 - protein, 9 aa, synthetic construct
MTMDWQFQG

SEQ ID NO: 4660 - protein, 9 aa, synthetic construct
MTSIVMENA

SEQ ID NO: 4661 - protein, 9 aa, synthetic construct
MTSRVDRTD

SEQ ID NO: 4662 - protein, 9 aa, synthetic construct
MVENWAKDM

SEQ ID NO: 4663 - protein, 9 aa, synthetic construct
MVEQFACLP

SEQ ID NO: 4664 - protein, 9 aa, synthetic construct
MVLCYNQMV

SEQ ID NO: 4665 - protein, 9 aa, synthetic construct
MVNMHVFHS

SEQ ID NO: 4666 - protein, 9 aa, synthetic construct
MVSVVRQGS

SEQ ID NO: 4667 - protein, 9 aa, synthetic construct
MVTEYYHDV

SEQ ID NO: 4668 - protein, 9 aa, synthetic construct
MWTMFNGQF

SEQ ID NO: 4669 - protein, 9 aa, synthetic construct
MYDTACVIG

SEQ ID NO: 4670 - protein, 9 aa, synthetic construct
MYWPDISRN

SEQ ID NO: 4671 - protein, 9 aa, synthetic construct
NATPWNFGT

SEQ ID NO: 4672 - protein, 9 aa, synthetic construct
NAVEKMAFN

SEQ ID NO: 4673 - protein, 9 aa, synthetic construct
NAYMQQAQG

SEQ ID NO: 4674 - protein, 9 aa, synthetic construct
NCMQMHWDG

SEQ ID NO: 4675 - protein, 9 aa, synthetic construct
NCNCDEYHY

SEQ ID NO: 4676 - protein, 9 aa, synthetic construct
NDGFDFWTC

SEQ ID NO: 4677 - protein, 9 aa, synthetic construct
NELNNGREF

SEQ ID NO: 4678 - protein, 9 aa, synthetic construct
NEPWPDHLP

SEQ ID NO: 4679 - protein, 9 aa, synthetic construct
NFCYKNIYA

SEQ ID NO: 4680 - protein, 9 aa, synthetic construct
NFMCSAGHT

SEQ ID NO: 4681 - protein, 9 aa, synthetic construct
NGPWDWWIN

SEQ ID NO: 4682 - protein, 9 aa, synthetic construct
NHFCGEWLQ

SEQ ID NO: 4683 - protein, 9 aa, synthetic construct
NHWILSCAE

SEQ ID NO: 4684 - protein, 9 aa, synthetic construct
NIERTVKHM

SEQ ID NO: 4685 - protein, 9 aa, synthetic construct
NIKHEEMWN

SEQ ID NO: 4686 - protein, 9 aa, synthetic construct
NIMTVDMWP

SEQ ID NO: 4687 - protein, 9 aa, synthetic construct
NIPFKERSW

SEQ ID NO: 4688 - protein, 9 aa, synthetic construct
NKPCWPCPH

SEQ ID NO: 4689 - protein, 9 aa, synthetic construct
NKSDMSCYG

SEQ ID NO: 4690 - protein, 9 aa, synthetic construct
NMSVYMKLG

SEQ ID NO: 4691 - protein, 9 aa, synthetic construct
NPHARTVNG

SEQ ID NO: 4692 - protein, 9 aa, synthetic construct
NPMPDWNFT

SEQ ID NO: 4693 - protein, 9 aa, synthetic construct
NPSMGYFGF

SEQ ID NO: 4694 - protein, 9 aa, synthetic construct
NQRIMDAGL

SEQ ID NO: 4695 - protein, 9 aa, synthetic construct
NRHLGNNPW

SEQ ID NO: 4696 - protein, 9 aa, synthetic construct
NRMNYDAWG

SEQ ID NO: 4697 - protein, 9 aa, synthetic construct
NRWSVYRAE

SEQ ID NO: 4698 - protein, 9 aa, synthetic construct
NTGCLKQAT

SEQ ID NO: 4699 - protein, 9 aa, synthetic construct
NTLRHCVHT

SEQ ID NO: 4700 - protein, 9 aa, synthetic construct
NTMQAMDVH

SEQ ID NO: 4701 - protein, 9 aa, synthetic construct
NTQWNQKVP

SEQ ID NO: 4702 - protein, 9 aa, synthetic construct
NVATQFWDM

SEQ ID NO: 4703 - protein, 9 aa, synthetic construct
NVGMYGQKA

SEQ ID NO: 4704 - protein, 9 aa, synthetic construct
NVHCQAASQ

SEQ ID NO: 4705 - protein, 9 aa, synthetic construct
NVIEYQNRD

SEQ ID NO: 4706 - protein, 9 aa, synthetic construct
NVPPPKFMA

SEQ ID NO: 4707 - protein, 9 aa, synthetic construct
NYALLGDWE

SEQ ID NO: 4708 - protein, 9 aa, synthetic construct
PCDVNHTSG

SEQ ID NO: 4709 - protein, 9 aa, synthetic construct
PCEFSTCVR

SEQ ID NO: 4710 - protein, 9 aa, synthetic construct
PCKGPPDIS

SEQ ID NO: 4711 - protein, 9 aa, synthetic construct
PCNDHPCAG

SEQ ID NO: 4712 - protein, 9 aa, synthetic construct
PCPCKGDAA

SEQ ID NO: 4713 - protein, 9 aa, synthetic construct
PDAERKPTW

SEQ ID NO: 4714 - protein, 9 aa, synthetic construct
PDCEKYENE

SEQ ID NO: 4715 - protein, 9 aa, synthetic construct
PDCFPWDHN

SEQ ID NO: 4716 - protein, 9 aa, synthetic construct
PDCGEWYPG

SEQ ID NO: 4717 - protein, 9 aa, synthetic construct
PDGILNTWW

SEQ ID NO: 4718 - protein, 9 aa, synthetic construct
PDICMQSGW

SEQ ID NO: 4719 - protein, 9 aa, synthetic construct
PDLWTWQSD

SEQ ID NO: 4720 - protein, 9 aa, synthetic construct
PDPWFMMRP

SEQ ID NO: 4721 - protein, 9 aa, synthetic construct
PEAELPDTS

SEQ ID NO: 4722 - protein, 9 aa, synthetic construct
PEKMRWMHH

SEQ ID NO: 4723 - protein, 9 aa, synthetic construct
PELTLVNPG

SEQ ID NO: 4724 - protein, 9 aa, synthetic construct
PFFPIDELG

SEQ ID NO: 4725 - protein, 9 aa, synthetic construct
PFNCKWGMF

SEQ ID NO: 4726 - protein, 9 aa, synthetic construct
PFNDHESEK

SEQ ID NO: 4727 - protein, 9 aa, synthetic construct
PGDQNSYPG

SEQ ID NO: 4728 - protein, 9 aa, synthetic construct
PGDRQEKMY

SEQ ID NO: 4729 - protein, 9 aa, synthetic construct
PGKEFQPKW

SEQ ID NO: 4730 - protein, 9 aa, synthetic construct
PGLLDNIPS

SEQ ID NO: 4731 - protein, 9 aa, synthetic construct
PGPRPGEMC

SEQ ID NO: 4732 - protein, 9 aa, synthetic construct
PHMPPFHCD

SEQ ID NO: 4733 - protein, 9 aa, synthetic construct
PIAPHNDYW

SEQ ID NO: 4734 - protein, 9 aa, synthetic construct
PIDQNPKFG

SEQ ID NO: 4735 - protein, 9 aa, synthetic construct
PIPSPYCGF

SEQ ID NO: 4736 - protein, 9 aa, synthetic construct
PKGSKYHEW

SEQ ID NO: 4737 - protein, 9 aa, synthetic construct
PKIEPPFHS

SEQ ID NO: 4738 - protein, 9 aa, synthetic construct
PKRGDSLPN

SEQ ID NO: 4739 - protein, 9 aa, synthetic construct
PLKSGWTRT

SEQ ID NO: 4740 - protein, 9 aa, synthetic construct
PLRTEISPW

SEQ ID NO: 4741 - protein, 9 aa, synthetic construct
PNECARGDC

SEQ ID NO: 4742 - protein, 9 aa, synthetic construct
PNFFNYHTS

SEQ ID NO: 4743 - protein, 9 aa, synthetic construct
PNGLAELKP

SEQ ID NO: 4744 - protein, 9 aa, synthetic construct
PPHCLWNTI

SEQ ID NO: 4745 - protein, 9 aa, synthetic construct
PPIMMTIAN

SEQ ID NO: 4746 - protein, 9 aa, synthetic construct
PPISHYWFD

SEQ ID NO: 4747 - protein, 9 aa, synthetic construct
PPKCHQWQW

SEQ ID NO: 4748 - protein, 9 aa, synthetic construct
PPLDTEHYF

SEQ ID NO: 4749 - protein, 9 aa, synthetic construct
PPLISGFET

SEQ ID NO: 4750 - protein, 9 aa, synthetic construct
PPNDRRFYD

SEQ ID NO: 4751 - protein, 9 aa, synthetic construct
PPPCLEAPY

SEQ ID NO: 4752 - protein, 9 aa, synthetic construct
PPPMQGSRM

SEQ ID NO: 4753 - protein, 9 aa, synthetic construct
PPPWHQFDE

SEQ ID NO: 4754 - protein, 9 aa, synthetic construct
PPRCEMLCM

SEQ ID NO: 4755 - protein, 9 aa, synthetic construct
PPRMPYHPY

SEQ ID NO: 4756 - protein, 9 aa, synthetic construct
PPVRMLFKQ

SEQ ID NO: 4757 - protein, 9 aa, synthetic construct
PPWYHKGNS

SEQ ID NO: 4758 - protein, 9 aa, synthetic construct
PQYEQYWQE

SEQ ID NO: 4759 - protein, 9 aa, synthetic construct
PREYHPEEP

SEQ ID NO: 4760 - protein, 9 aa, synthetic construct
PRFCMWCCG

SEQ ID NO: 4761 - protein, 9 aa, synthetic construct
PRLICHERS

SEQ ID NO: 4762 - protein, 9 aa, synthetic construct
PSIHGWELG

SEQ ID NO: 4763 - protein, 9 aa, synthetic construct
PVKSEMWPT

SEQ ID NO: 4764 - protein, 9 aa, synthetic construct
PWERWEHKG

SEQ ID NO: 4765 - protein, 9 aa, synthetic construct
PYHPPTSGN

SEQ ID NO: 4766 - protein, 9 aa, synthetic construct
PYLPDGNPM

SEQ ID NO: 4767 - protein, 9 aa, synthetic construct
PYSCIPDGC

SEQ ID NO: 4768 - protein, 9 aa, synthetic construct
QAACKIADL

SEQ ID NO: 4769 - protein, 9 aa, synthetic construct
QCEAVRRCR

SEQ ID NO: 4770 - protein, 9 aa, synthetic construct
QCLLIHEVG

SEQ ID NO: 4771 - protein, 9 aa, synthetic construct
QCTKLHDWH

SEQ ID NO: 4772 - protein, 9 aa, synthetic construct
QEKAMDNFQ

SEQ ID NO: 4773 - protein, 9 aa, synthetic construct
QEYSQWWDN

SEQ ID NO: 4774 - protein, 9 aa, synthetic construct
QFGTHHRHN

SEQ ID NO: 4775 - protein, 9 aa, synthetic construct
QFTHMNWLQ

SEQ ID NO: 4776 - protein, 9 aa, synthetic construct
QGCHLMTGQ

SEQ ID NO: 4777 - protein, 9 aa, synthetic construct
QGDFCQQMN

SEQ ID NO: 4778 - protein, 9 aa, synthetic construct
QGGWNSTCE

SEQ ID NO: 4779 - protein, 9 aa, synthetic construct
QGKENNVEE

SEQ ID NO: 4780 - protein, 9 aa, synthetic construct
QHDSKVAWM

SEQ ID NO: 4781 - protein, 9 aa, synthetic construct
QHVHKDGIE

SEQ ID NO: 4782 - protein, 9 aa, synthetic construct
QHYQPGPHN

SEQ ID NO: 4783 - protein, 9 aa, synthetic construct
QIEYAQMVG

SEQ ID NO: 4784 - protein, 9 aa, synthetic construct
QIQPVSCPN

SEQ ID NO: 4785 - protein, 9 aa, synthetic construct
QKQYQDCVT

SEQ ID NO: 4786 - protein, 9 aa, synthetic construct
QMAHVQYQQ

SEQ ID NO: 4787 - protein, 9 aa, synthetic construct
QNIQMHFLG

SEQ ID NO: 4788 - protein, 9 aa, synthetic construct
QNRETIVGG

SEQ ID NO: 4789 - protein, 9 aa, synthetic construct
QPMTREMPP

SEQ ID NO: 4790 - protein, 9 aa, synthetic construct
QQHQYTSKQ

SEQ ID NO: 4791 - protein, 9 aa, synthetic construct
QSCMKIHHA

SEQ ID NO: 4792 - protein, 9 aa, synthetic construct
QSISYTHND

SEQ ID NO: 4793 - protein, 9 aa, synthetic construct
QSNLKKEDH

SEQ ID NO: 4794 - protein, 9 aa, synthetic construct
QSSIENRFN

SEQ ID NO: 4795 - protein, 9 aa, synthetic construct
QSSYYYAQS

SEQ ID NO: 4796 - protein, 9 aa, synthetic construct
QSVKYNWGH

SEQ ID NO: 4797 - protein, 9 aa, synthetic construct
QTDVTQSMY

SEQ ID NO: 4798 - protein, 9 aa, synthetic construct
QTECLKWMR

SEQ ID NO: 4799 - protein, 9 aa, synthetic construct
QTGLYNVMV

SEQ ID NO: 4800 - protein, 9 aa, synthetic construct
QTHTQTYSW

SEQ ID NO: 4801 - protein, 9 aa, synthetic construct
QVDDGKGPE

SEQ ID NO: 4802 - protein, 9 aa, synthetic construct
QVIAVQDFR

SEQ ID NO: 4803 - protein, 9 aa, synthetic construct
QVVECQHIG

SEQ ID NO: 4804 - protein, 9 aa, synthetic construct
QVWDYERGI

SEQ ID NO: 4805 - protein, 9 aa, synthetic construct
QYCPNSLEF

SEQ ID NO: 4806 - protein, 9 aa, synthetic construct
QYQQSTVSN

SEQ ID NO: 4807 - protein, 9 aa, synthetic construct
QYRNIDEDY

SEQ ID NO: 4808 - protein, 9 aa, synthetic construct
RDMCQWDQP

SEQ ID NO: 4809 - protein, 9 aa, synthetic construct
RGVHVEVEE

SEQ ID NO: 4810 - protein, 9 aa, synthetic construct
RMQPINARI

SEQ ID NO: 4811 - protein, 9 aa, synthetic construct
RMVGLEKAY

SEQ ID NO: 4812 - protein, 9 aa, synthetic construct
RNQLKIDDM

SEQ ID NO: 4813 - protein, 9 aa, synthetic construct
RSTGILEHC

SEQ ID NO: 4814 - protein, 9 aa, synthetic construct
RSTSDPAML

SEQ ID NO: 4815 - protein, 9 aa, synthetic construct
RTAWDQPFS

SEQ ID NO: 4816 - protein, 9 aa, synthetic construct
RTNEAMMWN

SEQ ID NO: 4817 - protein, 9 aa, synthetic construct
RVDYCYYFQ

SEQ ID NO: 4818 - protein, 9 aa, synthetic construct
SACHNNTLQ

SEQ ID NO: 4819 - protein, 9 aa, synthetic construct
SAGYLQKVH

SEQ ID NO: 4820 - protein, 9 aa, synthetic construct
SASEAIAHQ

SEQ ID NO: 4821 - protein, 9 aa, synthetic construct
SCCQQFNSG

SEQ ID NO: 4822 - protein, 9 aa, synthetic construct
SDNGEYYRI

SEQ ID NO: 4823 - protein, 9 aa, synthetic construct
SDNIQVWPW

SEQ ID NO: 4824 - protein, 9 aa, synthetic construct
SDRQRFIPW

SEQ ID NO: 4825 - protein, 9 aa, synthetic construct
SFCGLLTGR

SEQ ID NO: 4826 - protein, 9 aa, synthetic construct
SGCPYWWPS

SEQ ID NO: 4827 - protein, 9 aa, synthetic construct
SGKEQDSWN

SEQ ID NO: 4828 - protein, 9 aa, synthetic construct
SHDVSGSCE

SEQ ID NO: 4829 - protein, 9 aa, synthetic construct
SHFCYSMQE

SEQ ID NO: 4830 - protein, 9 aa, synthetic construct
SISWKHSEA

SEQ ID NO: 4831 - protein, 9 aa, synthetic construct
SITVQHEIS

SEQ ID NO: 4832 - protein, 9 aa, synthetic construct
SKQCTGKEA

SEQ ID NO: 4833 - protein, 9 aa, synthetic construct
SLAWNRVIQ

SEQ ID NO: 4834 - protein, 9 aa, synthetic construct
SLPNEGYYP

SEQ ID NO: 4835 - protein, 9 aa, synthetic construct
SMAWRNVIP

SEQ ID NO: 4836 - protein, 9 aa, synthetic construct
SMCYVHGKE

SEQ ID NO: 4837 - protein, 9 aa, synthetic construct
SMEKPSHYQ

SEQ ID NO: 4838 - protein, 9 aa, synthetic construct
SPWYDQLCW

SEQ ID NO: 4839 - protein, 9 aa, synthetic construct
SSADNVCWS

SEQ ID NO: 4840 - protein, 9 aa, synthetic construct
SSCQFVADL

SEQ ID NO: 4841 - protein, 9 aa, synthetic construct
SSDQYEEMN

SEQ ID NO: 4842 - protein, 9 aa, synthetic construct
SSLCCNVGW

SEQ ID NO: 4843 - protein, 9 aa, synthetic construct
STDQYNQDF

SEQ ID NO: 4844 - protein, 9 aa, synthetic construct
STISEGSKN

SEQ ID NO: 4845 - protein, 9 aa, synthetic construct
STLRHALIE

SEQ ID NO: 4846 - protein, 9 aa, synthetic construct
SVAHSPMQC

SEQ ID NO: 4847 - protein, 9 aa, synthetic construct
SVAMKQIEE

SEQ ID NO: 4848 - protein, 9 aa, synthetic construct
SVGDNSFEH

SEQ ID NO: 4849 - protein, 9 aa, synthetic construct
SVLTPHVTF

SEQ ID NO: 4850 - protein, 9 aa, synthetic construct
SVTFKHQHQ

SEQ ID NO: 4851 - protein, 9 aa, synthetic construct
SYKEYLHDE

SEQ ID NO: 4852 - protein, 9 aa, synthetic construct
SYMWLQKGQ

SEQ ID NO: 4853 - protein, 9 aa, synthetic construct
SYSIKQFHP

SEQ ID NO: 4854 - protein, 9 aa, synthetic construct
TAAFMTTRD

SEQ ID NO: 4855 - protein, 9 aa, synthetic construct
TACKWVHAC

SEQ ID NO: 4856 - protein, 9 aa, synthetic construct
TANPTQGMQ

SEQ ID NO: 4857 - protein, 9 aa, synthetic construct
TAVDHGLFH

SEQ ID NO: 4858 - protein, 9 aa, synthetic construct
TCEPAVFGN

SEQ ID NO: 4859 - protein, 9 aa, synthetic construct
TCEVYRQEC

SEQ ID NO: 4860 - protein, 9 aa, synthetic construct
TCMRYNQHH

SEQ ID NO: 4861 - protein, 9 aa, synthetic construct
TCQIAHQEA

SEQ ID NO: 4862 - protein, 9 aa, synthetic construct
TECISKYPT

SEQ ID NO: 4863 - protein, 9 aa, synthetic construct
TGHQYEWGY

SEQ ID NO: 4864 - protein, 9 aa, synthetic construct
THHSSNQFF

SEQ ID NO: 4865 - protein, 9 aa, synthetic construct
TKTATDFWQ

SEQ ID NO: 4866 - protein, 9 aa, synthetic construct
TLQWMNAYR

SEQ ID NO: 4867 - protein, 9 aa, synthetic construct
TMGMKHACC

SEQ ID NO: 4868 - protein, 9 aa, synthetic construct
TPEHSVPGH

SEQ ID NO: 4869 - protein, 9 aa, synthetic construct
TPKCGLWKD

SEQ ID NO: 4870 - protein, 9 aa, synthetic construct
TQDEQRTMP

SEQ ID NO: 4871 - protein, 9 aa, synthetic construct
TQHPYMKWH

SEQ ID NO: 4872 - protein, 9 aa, synthetic construct
TSCEWDMMV

SEQ ID NO: 4873 - protein, 9 aa, synthetic construct
TSMCYRTEE

SEQ ID NO: 4874 - protein, 9 aa, synthetic construct
TTAFIGMHF

SEQ ID NO: 4875 - protein, 9 aa, synthetic construct
TTAVLRENG

SEQ ID NO: 4876 - protein, 9 aa, synthetic construct
TTLAVAHTG

SEQ ID NO: 4877 - protein, 9 aa, synthetic construct
TVAGWMSHN

SEQ ID NO: 4878 - protein, 9 aa, synthetic construct
TVAQSEAEF

SEQ ID NO: 4879 - protein, 9 aa, synthetic construct
TVDMVNREQ

SEQ ID NO: 4880 - protein, 9 aa, synthetic construct
TVFRVVQCA

SEQ ID NO: 4881 - protein, 9 aa, synthetic construct
TVGHPGHAC

SEQ ID NO: 4882 - protein, 9 aa, synthetic construct
TVHMWDQHA

SEQ ID NO: 4883 - protein, 9 aa, synthetic construct
TWRMKGDDK

SEQ ID NO: 4884 - protein, 9 aa, synthetic construct
TYNLCTLQP

SEQ ID NO: 4885 - protein, 9 aa, synthetic construct
VAGIHDVVP

SEQ ID NO: 4886 - protein, 9 aa, synthetic construct
VAKQLDCLG

SEQ ID NO: 4887 - protein, 9 aa, synthetic construct
VATELPADY

SEQ ID NO: 4888 - protein, 9 aa, synthetic construct
VCDQMQSFN

SEQ ID NO: 4889 - protein, 9 aa, synthetic construct
VGIEMMGSG

SEQ ID NO: 4890 - protein, 9 aa, synthetic construct
VHTHIIQDL

SEQ ID NO: 4891 - protein, 9 aa, synthetic construct
VIKNCYEAQ

SEQ ID NO: 4892 - protein, 9 aa, synthetic construct
VKAELHKTY

SEQ ID NO: 4893 - protein, 9 aa, synthetic construct
VKEHSHFCP

SEQ ID NO: 4894 - protein, 9 aa, synthetic construct
VKNTVHEMQ

SEQ ID NO: 4895 - protein, 9 aa, synthetic construct
VKQLFTKDN

SEQ ID NO: 4896 - protein, 9 aa, synthetic construct
VKSQSNGWN

SEQ ID NO: 4897 - protein, 9 aa, synthetic construct
VNFQYNLGI

SEQ ID NO: 4898 - protein, 9 aa, synthetic construct
VRAVKDTEG

SEQ ID NO: 4899 - protein, 9 aa, synthetic construct
VSNHRPLMP

SEQ ID NO: 4900 - protein, 9 aa, synthetic construct
VSQGIPKCE

SEQ ID NO: 4901 - protein, 9 aa, synthetic construct
VTQMGHMMV

SEQ ID NO: 4902 - protein, 9 aa, synthetic construct
VTQPKTDQT

SEQ ID NO: 4903 - protein, 9 aa, synthetic construct
VTYGNMEDR

SEQ ID NO: 4904 - protein, 9 aa, synthetic construct
VVCRMSGQD

SEQ ID NO: 4905 - protein, 9 aa, synthetic construct
VVGNANEQK

SEQ ID NO: 4906 - protein, 9 aa, synthetic construct
VVSKCEEMG

SEQ ID NO: 4907 - protein, 9 aa, synthetic construct
WDEKPYFGF

SEQ ID NO: 4908 - protein, 9 aa, synthetic construct
WDWWEVHRA

SEQ ID NO: 4909 - protein, 9 aa, synthetic construct
WENQGDLTR

SEQ ID NO: 4910 - protein, 9 aa, synthetic construct
WFQQSIMFI

SEQ ID NO: 4911 - protein, 9 aa, synthetic construct
WGMPPKDNM

SEQ ID NO: 4912 - protein, 9 aa, synthetic construct
WGPQNLFQG

SEQ ID NO: 4913 - protein, 9 aa, synthetic construct
WLWWEEPLW

SEQ ID NO: 4914 - protein, 9 aa, synthetic construct
WNIAPWDCS

SEQ ID NO: 4915 - protein, 9 aa, synthetic construct
WTYMEASDF

SEQ ID NO: 4916 - protein, 9 aa, synthetic construct
YCPKDDMVY

SEQ ID NO: 4917 - protein, 9 aa, synthetic construct
YCPSKLPRN

SEQ ID NO: 4918 - protein, 9 aa, synthetic construct
YEIKPEIVG

SEQ ID NO: 4919 - protein, 9 aa, synthetic construct
YEQNSMWMC

SEQ ID NO: 4920 - protein, 9 aa, synthetic construct
YGAPATWCD

SEQ ID NO: 4921 - protein, 9 aa, synthetic construct
YGKIKIYEW

SEQ ID NO: 4922 - protein, 9 aa, synthetic construct
YGPDLMRNE

SEQ ID NO: 4923 - protein, 9 aa, synthetic construct
YIDRLTYSF

SEQ ID NO: 4924 - protein, 9 aa, synthetic construct
YKESDWKIC

SEQ ID NO: 4925 - protein, 9 aa, synthetic construct
YMPVLKDQA

SEQ ID NO: 4926 - protein, 9 aa, synthetic construct
YPDLKEPMS

SEQ ID NO: 4927 - protein, 9 aa, synthetic construct
YPGLRYTRS

SEQ ID NO: 4928 - protein, 9 aa, synthetic construct
YPPVDQTPY

SEQ ID NO: 4929 - protein, 9 aa, synthetic construct
YQPRNECIQ

SEQ ID NO: 4930 - protein, 9 aa, synthetic construct
YQYPHELHY

SEQ ID NO: 4931 - protein, 9 aa, synthetic construct
YSNVGSRYA

SEQ ID NO: 4932 - protein, 9 aa, synthetic construct
YTHKLEAGN

SEQ ID NO: 4933 - protein, 9 aa, synthetic construct
YWDNQWLKI

SEQ ID NO: 4934 - protein, 9 aa, synthetic construct
CVMSLLKVP

SEQ ID NO: 4935 - protein, 9 aa, synthetic construct
CWVSYPFWM

SEQ ID NO: 4936 - protein, 9 aa, synthetic construct
CVMPYSNHP

SEQ ID NO: 4937 - protein, 9 aa, synthetic construct
PPIKDMLFK

SEQ ID NO: 4938 - protein, 9 aa, synthetic construct
CVLNWHVGS

SEQ ID NO: 4939 - protein, 9 aa, synthetic construct
PFPPPHKTL

SEQ ID NO: 4940 - protein, 9 aa, synthetic construct
GDPPPLSFK

SEQ ID NO: 4941 - protein, 9 aa, synthetic construct
CVRSLFWVF

SEQ ID NO: 4942 - protein, 9 aa, synthetic construct
CIVMYSNKY

SEQ ID NO: 4943 - protein, 9 aa, synthetic construct
CIVFYMKNQ

SEQ ID NO: 4944 - protein, 9 aa, synthetic construct
CWKWQMMFG

SEQ ID NO: 4945 - protein, 9 aa, synthetic construct
CVQQQFSAM

SEQ ID NO: 4946 - protein, 9 aa, synthetic construct
CIVPNKFMW

SEQ ID NO: 4947 - protein, 9 aa, synthetic construct
CVNYPNQAF

SEQ ID NO: 4948 - protein, 9 aa, synthetic construct
CVKYSNQQG

SEQ ID NO: 4949 - protein, 9 aa, synthetic construct
CYHQVFSQG

SEQ ID NO: 4950 - protein, 9 aa, synthetic construct
CVMNPMVFK

SEQ ID NO: 4951 - protein, 9 aa, synthetic construct
CVKQRGQRS

SEQ ID NO: 4952 - protein, 9 aa, synthetic construct
CVILSTRDK

SEQ ID NO: 4953 - protein, 9 aa, synthetic construct
CWKPWYLHG

SEQ ID NO: 4954 - protein, 9 aa, synthetic construct
CVMGSYLSM

SEQ ID NO: 4955 - protein, 9 aa, synthetic construct
CVWSQILGG

SEQ ID NO: 4956 - protein, 9 aa, synthetic construct
CIKHWFVKF

SEQ ID NO: 4957 - protein, 9 aa, synthetic construct
CIQLKRKMH

SEQ ID NO: 4958 - protein, 9 aa, synthetic construct
CIQQLMWQN

SEQ ID NO: 4959 - protein, 9 aa, synthetic construct
CVGPYRFGG

SEQ ID NO: 4960 - protein, 9 aa, synthetic construct
CWREFSFQN

SEQ ID NO: 4961 - protein, 9 aa, synthetic construct
CVYSVWKTS

SEQ ID NO: 4962 - protein, 9 aa, synthetic construct
CVKLHQFEE

SEQ ID NO: 4963 - protein, 9 aa, synthetic construct
CIMRWNSYG

SEQ ID NO: 4964 - protein, 9 aa, synthetic construct
CVGKYGGHS

SEQ ID NO: 4965 - protein, 9 aa, synthetic construct
CVQLVKEIG

SEQ ID NO: 4966 - protein, 9 aa, synthetic construct
CVAMLHHYY

SEQ ID NO: 4967 - protein, 9 aa, synthetic construct
CVMVPKGAG

SEQ ID NO: 4968 - protein, 9 aa, synthetic construct
EDWMDMDLK

SEQ ID NO: 4969 - protein, 9 aa, synthetic construct
CIGMKMQNG

SEQ ID NO: 4970 - protein, 9 aa, synthetic construct
CINFIMKLG

SEQ ID NO: 4971 - protein, 9 aa, synthetic construct
RIQEPPFPW

SEQ ID NO: 4972 - protein, 9 aa, synthetic construct
CVLVFSNSG

SEQ ID NO: 4973 - protein, 9 aa, synthetic construct
CAYMQQMHG

SEQ ID NO: 4974 - protein, 9 aa, synthetic construct
CYFLIQQNF

SEQ ID NO: 4975 - protein, 9 aa, synthetic construct
CAVPQVYQS

SEQ ID NO: 4976 - protein, 9 aa, synthetic construct
RIKEPPDPK

SEQ ID NO: 4977 - protein, 9 aa, synthetic construct
CVYLKGSLC

SEQ ID NO: 4978 - protein, 9 aa, synthetic construct
CVYHKEMTS

SEQ ID NO: 4979 - protein, 9 aa, synthetic construct
CVNFKTRQN

SEQ ID NO: 4980 - protein, 9 aa, synthetic construct
CDDFKKKMT

SEQ ID NO: 4981 - protein, 9 aa, synthetic construct
CISNLRMHG

SEQ ID NO: 4982 - protein, 9 aa, synthetic construct
CWSVMPMAG

SEQ ID NO: 4983 - protein, 9 aa, synthetic construct
CVNKVHSYN

SEQ ID NO: 4984 - protein, 9 aa, synthetic construct
CSVLKHHGW

SEQ ID NO: 4985 - protein, 9 aa, synthetic construct
CIKFFPIQG

SEQ ID NO: 4986 - protein, 9 aa, synthetic construct
CVFSTSFGE

SEQ ID NO: 4987 - protein, 9 aa, synthetic construct
CVSLYMDKL

SEQ ID NO: 4988 - protein, 9 aa, synthetic construct
CVSHSHHGS

SEQ ID NO: 4989 - protein, 9 aa, synthetic construct
CQMMPMKMD

SEQ ID NO: 4990 - protein, 9 aa, synthetic construct
CMVPYNMYQ

SEQ ID NO: 4991 - protein, 9 aa, synthetic construct
CWSQNQQGH

SEQ ID NO: 4992 - protein, 9 aa, synthetic construct
CVFTIFEAK

SEQ ID NO: 4993 - protein, 9 aa, synthetic construct
CVKQYMEMN

SEQ ID NO: 4994 - protein, 9 aa, synthetic construct
CVMTTPLWF

SEQ ID NO: 4995 - protein, 9 aa, synthetic construct
CVGYRVHSP

SEQ ID NO: 4996 - protein, 9 aa, synthetic construct
CVLSIRIIS

SEQ ID NO: 4997 - protein, 9 aa, synthetic construct
CVEYFLLHP

SEQ ID NO: 4998 - protein, 9 aa, synthetic construct
CPRPLMKNF

SEQ ID NO: 4999 - protein, 9 aa, synthetic construct
CVGLLEHSV

SEQ ID NO: 5000 - protein, 9 aa, synthetic construct
CISPVMMYH

SEQ ID NO: 5001 - protein, 9 aa, synthetic construct
CVVMSQMWM

SEQ ID NO: 5002 - protein, 9 aa, synthetic construct
CYNMYKMWS

SEQ ID NO: 5003 - protein, 9 aa, synthetic construct
QRPHRFPRH

SEQ ID NO: 5004 - protein, 9 aa, synthetic construct
CVMGKTVFN

SEQ ID NO: 5005 - protein, 9 aa, synthetic construct
CVHFKQFTW

SEQ ID NO: 5006 - protein, 9 aa, synthetic construct
CVRWKHFGY

SEQ ID NO: 5007 - protein, 9 aa, synthetic construct
CGNYIMYYK

SEQ ID NO: 5008 - protein, 9 aa, synthetic construct
CFICIMPKT

SEQ ID NO: 5009 - protein, 9 aa, synthetic construct
CVIYTRKHE

SEQ ID NO: 5010 - protein, 9 aa, synthetic construct
CITRQQNEQ

SEQ ID NO: 5011 - protein, 9 aa, synthetic construct
CILQMIILG

SEQ ID NO: 5012 - protein, 9 aa, synthetic construct
MVEEPVGPL

SEQ ID NO: 5013 - protein, 9 aa, synthetic construct
CVSMLGNHP

SEQ ID NO: 5014 - protein, 9 aa, synthetic construct
CIMWKKPAD

SEQ ID NO: 5015 - protein, 9 aa, synthetic construct
CVASYTLKP

SEQ ID NO: 5016 - protein, 9 aa, synthetic construct
CVFQDMLFK

SEQ ID NO: 5017 - protein, 9 aa, synthetic construct
CFYKIQHKG

SEQ ID NO: 5018 - protein, 9 aa, synthetic construct
CTVFPIQSG

SEQ ID NO: 5019 - protein, 9 aa, synthetic construct
CWVYMQGPS

SEQ ID NO: 5020 - protein, 9 aa, synthetic construct
CISQNPMVY

SEQ ID NO: 5021 - protein, 9 aa, synthetic construct
CTSPPRMWD

SEQ ID NO: 5022 - protein, 9 aa, synthetic construct
CVQMMWPFP

SEQ ID NO: 5023 - protein, 9 aa, synthetic construct
CVYTWGMQG

SEQ ID NO: 5024 - protein, 9 aa, synthetic construct
CVHVHQLYG

SEQ ID NO: 5025 - protein, 9 aa, synthetic construct
CIKLGNIIM

SEQ ID NO: 5026 - protein, 9 aa, synthetic construct
CTRSLLGMG

SEQ ID NO: 5027 - protein, 9 aa, synthetic construct
CVIRSSDQE

SEQ ID NO: 5028 - protein, 9 aa, synthetic construct
WHPGRNEKC

SEQ ID NO: 5029 - protein, 9 aa, synthetic construct
CSFNIHKHT

SEQ ID NO: 5030 - protein, 9 aa, synthetic construct
CVSQMGKWP

SEQ ID NO: 5031 - protein, 9 aa, synthetic construct
PIENPDQRI

SEQ ID NO: 5032 - protein, 9 aa, synthetic construct
CITFYGMWW

SEQ ID NO: 5033 - protein, 9 aa, synthetic construct
CVYTNVTSN

SEQ ID NO: 5034 - protein, 9 aa, synthetic construct
CVKQLSYWQ

SEQ ID NO: 5035 - protein, 9 aa, synthetic construct
CWGYPQVLM

SEQ ID NO: 5036 - protein, 9 aa, synthetic construct
CIKFKSPSD

SEQ ID NO: 5037 - protein, 9 aa, synthetic construct
CVTVSGRDY

SEQ ID NO: 5038 - protein, 9 aa, synthetic construct
CVVWPVLGQ

SEQ ID NO: 5039 - protein, 9 aa, synthetic construct
CVSWKNSGQ

SEQ ID NO: 5040 - protein, 9 aa, synthetic construct
CVLRMGTFC

SEQ ID NO: 5041 - protein, 9 aa, synthetic construct
CVGEFDSHR

SEQ ID NO: 5042 - protein, 9 aa, synthetic construct
CIMWYTNNP

SEQ ID NO: 5043 - protein, 9 aa, synthetic construct
CVIWQQITL

SEQ ID NO: 5044 - protein, 9 aa, synthetic construct
CVVVYLKMC

SEQ ID NO: 5045 - protein, 9 aa, synthetic construct
CVFPQVGKQ

SEQ ID NO: 5046 - protein, 9 aa, synthetic construct
CVTQLFHQL

SEQ ID NO: 5047 - protein, 9 aa, synthetic construct
HDESKSEPE

SEQ ID NO: 5048 - protein, 9 aa, synthetic construct
CTRHMFRLG

SEQ ID NO: 5049 - protein, 9 aa, synthetic construct
CIHKHPVSP

SEQ ID NO: 5050 - protein, 9 aa, synthetic construct
CHFHQMIFY

SEQ ID NO: 5051 - protein, 9 aa, synthetic construct
CTIPMQIIQ

SEQ ID NO: 5052 - protein, 9 aa, synthetic construct
CVMMMNTKF

SEQ ID NO: 5053 - protein, 9 aa, synthetic construct
CIMLHPVSF

SEQ ID NO: 5054 - protein, 9 aa, synthetic construct
CYKYWPMHL

SEQ ID NO: 5055 - protein, 9 aa, synthetic construct
CVVQNLFSG

SEQ ID NO: 5056 - protein, 9 aa, synthetic construct
CVLNYFQFG

SEQ ID NO: 5057 - protein, 9 aa, synthetic construct
CWYYRFKKN

SEQ ID NO: 5058 - protein, 9 aa, synthetic construct
PPLSFRPIP

SEQ ID NO: 5059 - protein, 9 aa, synthetic construct
CWKSMQFQY

SEQ ID NO: 5060 - protein, 9 aa, synthetic construct
CVVQWGKWN

SEQ ID NO: 5061 - protein, 9 aa, synthetic construct
DVEDDMEDN

SEQ ID NO: 5062 - protein, 9 aa, synthetic construct
CFIPYYKMG

SEQ ID NO: 5063 - protein, 9 aa, synthetic construct
KPEWWGILK

SEQ ID NO: 5064 - protein, 9 aa, synthetic construct
CWNLFQISR

SEQ ID NO: 5065 - protein, 9 aa, synthetic construct
CVKEFMMGC

SEQ ID NO: 5066 - protein, 9 aa, synthetic construct
ADDDEDMEI

SEQ ID NO: 5067 - protein, 9 aa, synthetic construct
CFWIKKNEI

SEQ ID NO: 5068 - protein, 9 aa, synthetic construct
CVGSQNHIT

SEQ ID NO: 5069 - protein, 9 aa, synthetic construct
CAMPYHFYW

SEQ ID NO: 5070 - protein, 9 aa, synthetic construct
CVQMKVLFG

SEQ ID NO: 5071 - protein, 9 aa, synthetic construct
CWMNMFSKH

SEQ ID NO: 5072 - protein, 9 aa, synthetic construct
CVVNQHKFI

SEQ ID NO: 5073 - protein, 9 aa, synthetic construct
CIKFEWRHN

SEQ ID NO: 5074 - protein, 9 aa, synthetic construct
PRTPPREQR

SEQ ID NO: 5075 - protein, 9 aa, synthetic construct
CINKYSGNT

SEQ ID NO: 5076 - protein, 9 aa, synthetic construct
FHPKPHPQN

SEQ ID NO: 5077 - protein, 9 aa, synthetic construct
CVGSQLHAM

SEQ ID NO: 5078 - protein, 9 aa, synthetic construct
CIFMNGFMG

SEQ ID NO: 5079 - protein, 9 aa, synthetic construct
REPNPLKSL

SEQ ID NO: 5080 - protein, 9 aa, synthetic construct
CVGRQLMYS

SEQ ID NO: 5081 - protein, 9 aa, synthetic construct
CVSIHQKNS

SEQ ID NO: 5082 - protein, 9 aa, synthetic construct
QNGINNFPD

SEQ ID NO: 5083 - protein, 9 aa, synthetic construct
CVSHSTFQS

SEQ ID NO: 5084 - protein, 9 aa, synthetic construct
CWPSMQLNY

SEQ ID NO: 5085 - protein, 9 aa, synthetic construct
CWILMLQMY

SEQ ID NO: 5086 - protein, 9 aa, synthetic construct
CVGAGGKVT

SEQ ID NO: 5087 - protein, 9 aa, synthetic construct
CVQHFMEHI

SEQ ID NO: 5088 - protein, 9 aa, synthetic construct
CVIHIMMYD

SEQ ID NO: 5089 - protein, 9 aa, synthetic construct
CWGYIHNFL

SEQ ID NO: 5090 - protein, 9 aa, synthetic construct
HFRQPWPFK

SEQ ID NO: 5091 - protein, 9 aa, synthetic construct
PHGEPRKIS

SEQ ID NO: 5092 - protein, 9 aa, synthetic construct
CISNYLKQG

SEQ ID NO: 5093 - protein, 9 aa, synthetic construct
CVWLKLFWY

SEQ ID NO: 5094 - protein, 9 aa, synthetic construct
CTHMNLLHM

SEQ ID NO: 5095 - protein, 9 aa, synthetic construct
CVMFREGSR

SEQ ID NO: 5096 - protein, 9 aa, synthetic construct
CTIFMKSSN

SEQ ID NO: 5097 - protein, 9 aa, synthetic construct
CVMTLVMMC

SEQ ID NO: 5098 - protein, 9 aa, synthetic construct
CITKTKGQS

SEQ ID NO: 5099 - protein, 9 aa, synthetic construct
CVIEILLWH

SEQ ID NO: 5100 - protein, 9 aa, synthetic construct
CIMMRIPCG

SEQ ID NO: 5101 - protein, 9 aa, synthetic construct
CVRSQLCNE

SEQ ID NO: 5102 - protein, 9 aa, synthetic construct
CVGLKGIFE

SEQ ID NO: 5103 - protein, 9 aa, synthetic construct
CVFWLGIRS

SEQ ID NO: 5104 - protein, 9 aa, synthetic construct
CVGLLLFHG

SEQ ID NO: 5105 - protein, 9 aa, synthetic construct
CVHPFVSWK

SEQ ID NO: 5106 - protein, 9 aa, synthetic construct
CVQQTMFNL

SEQ ID NO: 5107 - protein, 9 aa, synthetic construct
CVKTQGFIH

SEQ ID NO: 5108 - protein, 9 aa, synthetic construct
CWQFFMSLV

SEQ ID NO: 5109 - protein, 9 aa, synthetic construct
CIVPNQTRM

SEQ ID NO: 5110 - protein, 9 aa, synthetic construct
RNDWKWPQE

SEQ ID NO: 5111 - protein, 9 aa, synthetic construct
CRLYYIQHP

SEQ ID NO: 5112 - protein, 9 aa, synthetic construct
MPFFDWIFK

SEQ ID NO: 5113 - protein, 9 aa, synthetic construct
CVTHIQTGY

SEQ ID NO: 5114 - protein, 9 aa, synthetic construct
PHINKWKMY

SEQ ID NO: 5115 - protein, 9 aa, synthetic construct
IIMDQDSPK

SEQ ID NO: 5116 - protein, 9 aa, synthetic construct
CWQKRDILF

SEQ ID NO: 5117 - protein, 9 aa, synthetic construct
MVIFKNGKP

SEQ ID NO: 5118 - protein, 9 aa, synthetic construct
CFWIHKMAA

SEQ ID NO: 5119 - protein, 9 aa, synthetic construct
CAFPLNRQK

SEQ ID NO: 5120 - protein, 9 aa, synthetic construct
LMMCPIHQT

SEQ ID NO: 5121 - protein, 9 aa, synthetic construct
CMGRQFLQS

SEQ ID NO: 5122 - protein, 9 aa, synthetic construct
WKNRDEKNI

SEQ ID NO: 5123 - protein, 9 aa, synthetic construct
CIILLGSRD

SEQ ID NO: 5124 - protein, 9 aa, synthetic construct
RTNYRPPAC

SEQ ID NO: 5125 - protein, 9 aa, synthetic construct
CIMQYIKMY

SEQ ID NO: 5126 - protein, 9 aa, synthetic construct
NIRQYMLQN

SEQ ID NO: 5127 - protein, 9 aa, synthetic construct
CVFQKMNSD

SEQ ID NO: 5128 - protein, 9 aa, synthetic construct
CVQLHKNHG

SEQ ID NO: 5129 - protein, 9 aa, synthetic construct
CVFKMEPTE

SEQ ID NO: 5130 - protein, 9 aa, synthetic construct
CSNIWVPKM

SEQ ID NO: 5131 - protein, 9 aa, synthetic construct
CNVSYMFMG

SEQ ID NO: 5132 - protein, 9 aa, synthetic construct
CVRRSLGLP

SEQ ID NO: 5133 - protein, 9 aa, synthetic construct
CWYSTFKRG

SEQ ID NO: 5134 - protein, 9 aa, synthetic construct
CVAMHRHNS

SEQ ID NO: 5135 - protein, 9 aa, synthetic construct
CIIVKISKG

SEQ ID NO: 5136 - protein, 9 aa, synthetic construct
WFVWIYPLK

SEQ ID NO: 5137 - protein, 9 aa, synthetic construct
CGPYIVSLR

SEQ ID NO: 5138 - protein, 9 aa, synthetic construct
CVSLFLHSG

SEQ ID NO: 5139 - protein, 9 aa, synthetic construct
CMHQLRNRF

SEQ ID NO: 5140 - protein, 9 aa, synthetic construct
HNYLPRNRP

SEQ ID NO: 5141 - protein, 9 aa, synthetic construct
CVGIIQMGF

SEQ ID NO: 5142 - protein, 9 aa, synthetic construct
CIKLNHHHK

SEQ ID NO: 5143 - protein, 9 aa, synthetic construct
CWRHNIISP

SEQ ID NO: 5144 - protein, 9 aa, synthetic construct
WIFFKDFMM

SEQ ID NO: 5145 - protein, 9 aa, synthetic construct
LPRWMINPY

SEQ ID NO: 5146 - protein, 9 aa, synthetic construct
PPTHDCKPK

SEQ ID NO: 5147 - protein, 9 aa, synthetic construct
PPYCLDMKR

SEQ ID NO: 5148 - protein, 9 aa, synthetic construct
CVHVYNFQM

SEQ ID NO: 5149 - protein, 9 aa, synthetic construct
CVDSYIRWM

SEQ ID NO: 5150 - protein, 9 aa, synthetic construct
CFLRLKKHH

SEQ ID NO: 5151 - protein, 9 aa, synthetic construct
CKVLYIQIG

SEQ ID NO: 5152 - protein, 9 aa, synthetic construct
CIVNTKKYH

SEQ ID NO: 5153 - protein, 9 aa, synthetic construct
CVRGIFSDH

SEQ ID NO: 5154 - protein, 9 aa, synthetic construct
CVGRILRSC

SEQ ID NO: 5155 - protein, 9 aa, synthetic construct
CVIWYHKYE

SEQ ID NO: 5156 - protein, 9 aa, synthetic construct
YICFVSYRN

SEQ ID NO: 5157 - protein, 9 aa, synthetic construct
CWTKLVQHQ

SEQ ID NO: 5158 - protein, 9 aa, synthetic construct
CVMNWDFFI

SEQ ID NO: 5159 - protein, 9 aa, synthetic construct
CVMFAHNTQ

SEQ ID NO: 5160 - protein, 9 aa, synthetic construct
CVLYFTFGK

SEQ ID NO: 5161 - protein, 9 aa, synthetic construct
CTHMMGKSP

SEQ ID NO: 5162 - protein, 9 aa, synthetic construct
WDTQLLPNI

SEQ ID NO: 5163 - protein, 9 aa, synthetic construct
CFIHMQKFP

SEQ ID NO: 5164 - protein, 9 aa, synthetic construct
CSMPLYSYY

SEQ ID NO: 5165 - protein, 9 aa, synthetic construct
CIQSFGSGP

SEQ ID NO: 5166 - protein, 9 aa, synthetic construct
YWGEFIKKS

SEQ ID NO: 5167 - protein, 9 aa, synthetic construct
CISKKGRWY

SEQ ID NO: 5168 - protein, 9 aa, synthetic construct
CIKQIKTYE

SEQ ID NO: 5169 - protein, 9 aa, synthetic construct
CTQPFNRQD

SEQ ID NO: 5170 - protein, 9 aa, synthetic construct
CVSWLLGQG

SEQ ID NO: 5171 - protein, 9 aa, synthetic construct
DPEDDPGNE

SEQ ID NO: 5172 - protein, 9 aa, synthetic construct
CVGHGSHQK

SEQ ID NO: 5173 - protein, 9 aa, synthetic construct
CWKMFSLHG

SEQ ID NO: 5174 - protein, 9 aa, synthetic construct
CIMKPDNYP

SEQ ID NO: 5175 - protein, 9 aa, synthetic construct
CVQQLVQIE

SEQ ID NO: 5176 - protein, 9 aa, synthetic construct
EEPEPYLKN

SEQ ID NO: 5177 - protein, 9 aa, synthetic construct
CIRFQNPPF

SEQ ID NO: 5178 - protein, 9 aa, synthetic construct
CIKWVDIFP

SEQ ID NO: 5179 - protein, 9 aa, synthetic construct
NGPFGEWKR

SEQ ID NO: 5180 - protein, 9 aa, synthetic construct
YNPDDKRVI

SEQ ID NO: 5181 - protein, 9 aa, synthetic construct
DEGHKKFLK

SEQ ID NO: 5182 - protein, 9 aa, synthetic construct
CVRSYQIVG

SEQ ID NO: 5183 - protein, 9 aa, synthetic construct
PPRHQWNFY

SEQ ID NO: 5184 - protein, 9 aa, synthetic construct
CISSKLRGF

SEQ ID NO: 5185 - protein, 9 aa, synthetic construct
CVTFQLGWQ

SEQ ID NO: 5186 - protein, 9 aa, synthetic construct
ATYLKMSSP

SEQ ID NO: 5187 - protein, 9 aa, synthetic construct
CVSGSNFPH

SEQ ID NO: 5188 - protein, 9 aa, synthetic construct
CVSFYNHME

SEQ ID NO: 5189 - protein, 9 aa, synthetic construct
CFHVMMKYE

SEQ ID NO: 5190 - protein, 9 aa, synthetic construct
CVWRITQQE

SEQ ID NO: 5191 - protein, 9 aa, synthetic construct
DVDELDIHI

SEQ ID NO: 5192 - protein, 9 aa, synthetic construct
CWAKIMPLF

SEQ ID NO: 5193 - protein, 9 aa, synthetic construct
CWSHLYFQT

SEQ ID NO: 5194 - protein, 9 aa, synthetic construct
EVLDWIETE

SEQ ID NO: 5195 - protein, 9 aa, synthetic construct
CHYQNLKTH

SEQ ID NO: 5196 - protein, 9 aa, synthetic construct
CVTQQHRDG

SEQ ID NO: 5197 - protein, 9 aa, synthetic construct
CVVMMQIWP

SEQ ID NO: 5198 - protein, 9 aa, synthetic construct
PRKYPWKKK

SEQ ID NO: 5199 - protein, 9 aa, synthetic construct
CGCRFIYYQ

SEQ ID NO: 5200 - protein, 9 aa, synthetic construct
QRWKHDPLP

SEQ ID NO: 5201 - protein, 9 aa, synthetic construct
CVSLLEMSI

SEQ ID NO: 5202 - protein, 9 aa, synthetic construct
HNIKPWKPY

SEQ ID NO: 5203 - protein, 9 aa, synthetic construct
QENETFKKL

SEQ ID NO: 5204 - protein, 9 aa, synthetic construct
DVDEEQDIF

SEQ ID NO: 5205 - protein, 9 aa, synthetic construct
CVACKMKTG

SEQ ID NO: 5206 - protein, 9 aa, synthetic construct
CFFYPMSMS

SEQ ID NO: 5207 - protein, 9 aa, synthetic construct
PDERLFNKK

SEQ ID NO: 5208 - protein, 9 aa, synthetic construct
CSTPMRMYM

SEQ ID NO: 5209 - protein, 9 aa, synthetic construct
CFWQYGLVT

SEQ ID NO: 5210 - protein, 9 aa, synthetic construct
CWLPFQMFH

SEQ ID NO: 5211 - protein, 9 aa, synthetic construct
CTRQSIIVY

SEQ ID NO: 5212 - protein, 9 aa, synthetic construct
CISVYFMWP

SEQ ID NO: 5213 - protein, 9 aa, synthetic construct
DPRKLEPRI

SEQ ID NO: 5214 - protein, 9 aa, synthetic construct
CTIGTMGPF

SEQ ID NO: 5215 - protein, 9 aa, synthetic construct
CVRTLQSPD

SEQ ID NO: 5216 - protein, 9 aa, synthetic construct
QDRFNHKPW

SEQ ID NO: 5217 - protein, 9 aa, synthetic construct
CVSTVLNMG

SEQ ID NO: 5218 - protein, 9 aa, synthetic construct
GDFPDEDDW

SEQ ID NO: 5219 - protein, 9 aa, synthetic construct
CVWIWQNSY

SEQ ID NO: 5220 - protein, 9 aa, synthetic construct
ETEYYQPFL

SEQ ID NO: 5221 - protein, 9 aa, synthetic construct
YCPHRDRTH

SEQ ID NO: 5222 - protein, 9 aa, synthetic construct
FEDEPEPWK

SEQ ID NO: 5223 - protein, 9 aa, synthetic construct
PFDEGEPEI

SEQ ID NO: 5224 - protein, 9 aa, synthetic construct
CVLKGKHEG

SEQ ID NO: 5225 - protein, 9 aa, synthetic construct
CVQVLQLGG

SEQ ID NO: 5226 - protein, 9 aa, synthetic construct
CTISQKMIW

SEQ ID NO: 5227 - protein, 9 aa, synthetic construct
PKMSLMKFN

SEQ ID NO: 5228 - protein, 9 aa, synthetic construct
CWSMYNSRY

SEQ ID NO: 5229 - protein, 9 aa, synthetic construct
CWVMLYRGW

SEQ ID NO: 5230 - protein, 9 aa, synthetic construct
CWTRQSNWP

SEQ ID NO: 5231 - protein, 9 aa, synthetic construct
CVSPYTGLL

SEQ ID NO: 5232 - protein, 9 aa, synthetic construct
PPPFFKYRG

SEQ ID NO: 5233 - protein, 9 aa, synthetic construct
CTLYFGFIY

SEQ ID NO: 5234 - protein, 9 aa, synthetic construct
AADGYVAQD

SEQ ID NO: 5235 - protein, 9 aa, synthetic construct
AAMSSSHSY

SEQ ID NO: 5236 - protein, 9 aa, synthetic construct
AARMVGEFY

SEQ ID NO: 5237 - protein, 9 aa, synthetic construct
ACSQIGQDD

SEQ ID NO: 5238 - protein, 9 aa, synthetic construct
ADYSMMWHM

SEQ ID NO: 5239 - protein, 9 aa, synthetic construct
AEHMVVDHE

SEQ ID NO: 5240 - protein, 9 aa, synthetic construct
AERDHKTIY

SEQ ID NO: 5241 - protein, 9 aa, synthetic construct
AFARQEYAN

SEQ ID NO: 5242 - protein, 9 aa, synthetic construct
AGMYKCQED

SEQ ID NO: 5243 - protein, 9 aa, synthetic construct
AHQTAWAWI

SEQ ID NO: 5244 - protein, 9 aa, synthetic construct
AHQTPWAWI

SEQ ID NO: 5245 - protein, 9 aa, synthetic construct
AIGPALCLT

SEQ ID NO: 5246 - protein, 9 aa, synthetic construct
AIGPDRSNN

SEQ ID NO: 5247 - protein, 9 aa, synthetic construct
AKCTILNFQ

SEQ ID NO: 5248 - protein, 9 aa, synthetic construct
AKRECTHIP

SEQ ID NO: 5249 - protein, 9 aa, synthetic construct
ALQYCQGKD

SEQ ID NO: 5250 - protein, 9 aa, synthetic construct
ANGTRECQS

SEQ ID NO: 5251 - protein, 9 aa, synthetic construct
ANLISQGHC

SEQ ID NO: 5252 - protein, 9 aa, synthetic construct
ANRMIWYPY

SEQ ID NO: 5253 - protein, 9 aa, synthetic construct
AQCHDMWGH

SEQ ID NO: 5254 - protein, 9 aa, synthetic construct
ARKNCDHLN

SEQ ID NO: 5255 - protein, 9 aa, synthetic construct
ARSGINGHE

SEQ ID NO: 5256 - protein, 9 aa, synthetic construct
ASMHEETCL

SEQ ID NO: 5257 - protein, 9 aa, synthetic construct
ASRSCMTQE

SEQ ID NO: 5258 - protein, 9 aa, synthetic construct
ATDMIFVSN

SEQ ID NO: 5259 - protein, 9 aa, synthetic construct
ATGTYNLQE

SEQ ID NO: 5260 - protein, 9 aa, synthetic construct
AVAEIRPEP

SEQ ID NO: 5261 - protein, 9 aa, synthetic construct
AVHWHRKCE

SEQ ID NO: 5262 - protein, 9 aa, synthetic construct
AVNEAQDNR

SEQ ID NO: 5263 - protein, 9 aa, synthetic construct
AVTQLSVER

SEQ ID NO: 5264 - protein, 9 aa, synthetic construct
AVYLDHVFS

SEQ ID NO: 5265 - protein, 9 aa, synthetic construct
AWSYTGACY

SEQ ID NO: 5266 - protein, 9 aa, synthetic construct
AYAPSKNAM

SEQ ID NO: 5267 - protein, 9 aa, synthetic construct
CAGMAWSHS

SEQ ID NO: 5268 - protein, 9 aa, synthetic construct
CAWHMKQGN

SEQ ID NO: 5269 - protein, 9 aa, synthetic construct
CCCVPRSIY

SEQ ID NO: 5270 - protein, 9 aa, synthetic construct
CCLWSYWAF

SEQ ID NO: 5271 - protein, 9 aa, synthetic construct
CHILDGLHD

SEQ ID NO: 5272 - protein, 9 aa, synthetic construct
CIMLNGCFQ

SEQ ID NO: 5273 - protein, 9 aa, synthetic construct
CIQPTWDSY

SEQ ID NO: 5274 - protein, 9 aa, synthetic construct
CIRFMMREG

SEQ ID NO: 5275 - protein, 9 aa, synthetic construct
CKQLFCELG

SEQ ID NO: 5276 - protein, 9 aa, synthetic construct
CNEVCRNYL

SEQ ID NO: 5277 - protein, 9 aa, synthetic construct
CNYPIIWDK

SEQ ID NO: 5278 - protein, 9 aa, synthetic construct
CRMITMMNE

SEQ ID NO: 5279 - protein, 9 aa, synthetic construct
CVDTNRMWQ

SEQ ID NO: 5280 - protein, 9 aa, synthetic construct
CVFSRNNYQ

SEQ ID NO: 5281 - protein, 9 aa, synthetic construct
CVKPFLTGW

SEQ ID NO: 5282 - protein, 9 aa, synthetic construct
CVNLMAVNN

SEQ ID NO: 5283 - protein, 9 aa, synthetic construct
CVRIGMREP

SEQ ID NO: 5284 - protein, 9 aa, synthetic construct
CWGPIMHPF

SEQ ID NO: 5285 - protein, 9 aa, synthetic construct
DARKTYICY

SEQ ID NO: 5286 - protein, 9 aa, synthetic construct
DATRAQTGE

SEQ ID NO: 5287 - protein, 9 aa, synthetic construct
DCRCYDCHD

SEQ ID NO: 5288 - protein, 9 aa, synthetic construct
DEAKKSCWQ

SEQ ID NO: 5289 - protein, 9 aa, synthetic construct
DEGYIMFAP

SEQ ID NO: 5290 - protein, 9 aa, synthetic construct
DGEFLHEVL

SEQ ID NO: 5291 - protein, 9 aa, synthetic construct
DHCHCIAHP

SEQ ID NO: 5292 - protein, 9 aa, synthetic construct
DHIHIERAN

SEQ ID NO: 5293 - protein, 9 aa, synthetic construct
DHLSICCQN

SEQ ID NO: 5294 - protein, 9 aa, synthetic construct
DIATMRNTW

SEQ ID NO: 5295 - protein, 9 aa, synthetic construct
DICQKQSPN

SEQ ID NO: 5296 - protein, 9 aa, synthetic construct
DIEFLDCEN

SEQ ID NO: 5297 - protein, 9 aa, synthetic construct
DKMSLQVQI

SEQ ID NO: 5298 - protein, 9 aa, synthetic construct
DLVDLRSWM

SEQ ID NO: 5299 - protein, 9 aa, synthetic construct
DMTLQSVSS

SEQ ID NO: 5300 - protein, 9 aa, synthetic construct
DNYWIVPFA

SEQ ID NO: 5301 - protein, 9 aa, synthetic construct
DPGWYGLAP

SEQ ID NO: 5302 - protein, 9 aa, synthetic construct
DQFCPFDHY

SEQ ID NO: 5303 - protein, 9 aa, synthetic construct
DQRMLLKEL

SEQ ID NO: 5304 - protein, 9 aa, synthetic construct
DQSMMTIGQ

SEQ ID NO: 5305 - protein, 9 aa, synthetic construct
DRKQADQIY

SEQ ID NO: 5306 - protein, 9 aa, synthetic construct
DSAKQWHHQ

SEQ ID NO: 5307 - protein, 9 aa, synthetic construct
DTAFMHHHV

SEQ ID NO: 5308 - protein, 9 aa, synthetic construct
DTHHVHGWQ

SEQ ID NO: 5309 - protein, 9 aa, synthetic construct
DVCRKPVSH

SEQ ID NO: 5310 - protein, 9 aa, synthetic construct
DVIRDMIAE

SEQ ID NO: 5311 - protein, 9 aa, synthetic construct
DVKSWAVCD

SEQ ID NO: 5312 - protein, 9 aa, synthetic construct
DVMQYQNHM

SEQ ID NO: 5313 - protein, 9 aa, synthetic construct
DVRACMEDL

SEQ ID NO: 5314 - protein, 9 aa, synthetic construct
DVTQTRYCY

SEQ ID NO: 5315 - protein, 9 aa, synthetic construct
DWRYFCVSL

SEQ ID NO: 5316 - protein, 9 aa, synthetic construct
EAYITYNKA

SEQ ID NO: 5317 - protein, 9 aa, synthetic construct
ECIFAPRMS

SEQ ID NO: 5318 - protein, 9 aa, synthetic construct
EDGLIVYGP

SEQ ID NO: 5319 - protein, 9 aa, synthetic construct
EERPWEWET

SEQ ID NO: 5320 - protein, 9 aa, synthetic construct
EFDWLLGTI

SEQ ID NO: 5321 - protein, 9 aa, synthetic construct
EFKCVSDCL

SEQ ID NO: 5322 - protein, 9 aa, synthetic construct
EGATAWQDR

SEQ ID NO: 5323 - protein, 9 aa, synthetic construct
EHSSPREDN

SEQ ID NO: 5324 - protein, 9 aa, synthetic construct
EICMRSGFI

SEQ ID NO: 5325 - protein, 9 aa, synthetic construct
EIIQAHLIN

SEQ ID NO: 5326 - protein, 9 aa, synthetic construct
EITQHFVKH

SEQ ID NO: 5327 - protein, 9 aa, synthetic construct
EKRLEGWVY

SEQ ID NO: 5328 - protein, 9 aa, synthetic construct
ELPDTEVPW

SEQ ID NO: 5329 - protein, 9 aa, synthetic construct
ELRMSFTKV

SEQ ID NO: 5330 - protein, 9 aa, synthetic construct
EPLVCISAG

SEQ ID NO: 5331 - protein, 9 aa, synthetic construct
EPMPMPVWN

SEQ ID NO: 5332 - protein, 9 aa, synthetic construct
EQLRDLNIE

SEQ ID NO: 5333 - protein, 9 aa, synthetic construct
EQPHISIKG

SEQ ID NO: 5334 - protein, 9 aa, synthetic construct
ERFKTFCEE

SEQ ID NO: 5335 - protein, 9 aa, synthetic construct
ERKTTADWK

SEQ ID NO: 5336 - protein, 9 aa, synthetic construct
ERQAHNHYA

SEQ ID NO: 5337 - protein, 9 aa, synthetic construct
ERTACKMKS

SEQ ID NO: 5338 - protein, 9 aa, synthetic construct
ERYYPISSF

SEQ ID NO: 5339 - protein, 9 aa, synthetic construct
ESRQVQDCY

SEQ ID NO: 5340 - protein, 9 aa, synthetic construct
ETEIRQMDG

SEQ ID NO: 5341 - protein, 9 aa, synthetic construct
ETHRGTVGL

SEQ ID NO: 5342 - protein, 9 aa, synthetic construct
EVRSTRKNH

SEQ ID NO: 5343 - protein, 9 aa, synthetic construct
EWEGVSQFR

SEQ ID NO: 5344 - protein, 9 aa, synthetic construct
EWHARHHYW

SEQ ID NO: 5345 - protein, 9 aa, synthetic construct
EYCEFMSEA

SEQ ID NO: 5346 - protein, 9 aa, synthetic construct
EYSRCCHQE

SEQ ID NO: 5347 - protein, 9 aa, synthetic construct
FAESMWCDR

SEQ ID NO: 5348 - protein, 9 aa, synthetic construct
FAPEFDNHC

SEQ ID NO: 5349 - protein, 9 aa, synthetic construct
FAQQIINAS

SEQ ID NO: 5350 - protein, 9 aa, synthetic construct
FCVKSPRVD

SEQ ID NO: 5351 - protein, 9 aa, synthetic construct
FKPFAQQWN

SEQ ID NO: 5352 - protein, 9 aa, synthetic construct
FLTCDQFEW

SEQ ID NO: 5353 - protein, 9 aa, synthetic construct
FNTPYAHIG

SEQ ID NO: 5354 - protein, 9 aa, synthetic construct
FQTSINYYG

SEQ ID NO: 5355 - protein, 9 aa, synthetic construct
FRAVYYYHS

SEQ ID NO: 5356 - protein, 9 aa, synthetic construct
FRDVCMHDV

SEQ ID NO: 5357 - protein, 9 aa, synthetic construct
FSYQIQCQN

SEQ ID NO: 5358 - protein, 9 aa, synthetic construct
FTEWKPVFF

SEQ ID NO: 5359 - protein, 9 aa, synthetic construct
FTHSCCCLS

SEQ ID NO: 5360 - protein, 9 aa, synthetic construct
GAGPVQSEE

SEQ ID NO: 5361 - protein, 9 aa, synthetic construct
GAKYIQNTD

SEQ ID NO: 5362 - protein, 9 aa, synthetic construct
GCLTSECAY

SEQ ID NO: 5363 - protein, 9 aa, synthetic construct
GCMCIRHAY

SEQ ID NO: 5364 - protein, 9 aa, synthetic construct
GDMCEDMCT

SEQ ID NO: 5365 - protein, 9 aa, synthetic construct
GDVSYDAEA

SEQ ID NO: 5366 - protein, 9 aa, synthetic construct
GEMTRCFHN

SEQ ID NO: 5367 - protein, 9 aa, synthetic construct
GFQRTHVDQ

SEQ ID NO: 5368 - protein, 9 aa, synthetic construct
GFTPDRCRN

SEQ ID NO: 5369 - protein, 9 aa, synthetic construct
GGCCGGELN

SEQ ID NO: 5370 - protein, 9 aa, synthetic construct
GGDGRVHNK

SEQ ID NO: 5371 - protein, 9 aa, synthetic construct
GGDRMATDR

SEQ ID NO: 5372 - protein, 9 aa, synthetic construct
GGSYVSAPD

SEQ ID NO: 5373 - protein, 9 aa, synthetic construct
GHMFETFWG

SEQ ID NO: 5374 - protein, 9 aa, synthetic construct
GIDLMRQIN

SEQ ID NO: 5375 - protein, 9 aa, synthetic construct
GIHQLIHHC

SEQ ID NO: 5376 - protein, 9 aa, synthetic construct
GLFHPQFGQ

SEQ ID NO: 5377 - protein, 9 aa, synthetic construct
GMSDCEVSF

SEQ ID NO: 5378 - protein, 9 aa, synthetic construct
GNECFHNVE

SEQ ID NO: 5379 - protein, 9 aa, synthetic construct
GNKSPDECF

SEQ ID NO: 5380 - protein, 9 aa, synthetic construct
GPARSFEAC

SEQ ID NO: 5381 - protein, 9 aa, synthetic construct
GQPVWCVCM

SEQ ID NO: 5382 - protein, 9 aa, synthetic construct
GREITQVMS

SEQ ID NO: 5383 - protein, 9 aa, synthetic construct
GRWMCNEAE

SEQ ID NO: 5384 - protein, 9 aa, synthetic construct
GSCCLNNET

SEQ ID NO: 5385 - protein, 9 aa, synthetic construct
GSKIIMHTE

SEQ ID NO: 5386 - protein, 9 aa, synthetic construct
GSQQTTLSC

SEQ ID NO: 5387 - protein, 9 aa, synthetic construct
GSYIVQNHC

SEQ ID NO: 5388 - protein, 9 aa, synthetic construct
GTEPIMWRD

SEQ ID NO: 5389 - protein, 9 aa, synthetic construct
GTIRMPEHR

SEQ ID NO: 5390 - protein, 9 aa, synthetic construct
GTNAYMAHK

SEQ ID NO: 5391 - protein, 9 aa, synthetic construct
GVHHRCRMT

SEQ ID NO: 5392 - protein, 9 aa, synthetic construct
GVITVDAKG

SEQ ID NO: 5393 - protein, 9 aa, synthetic construct
GWDMLSVAK

SEQ ID NO: 5394 - protein, 9 aa, synthetic construct
GYKFIGRSR

SEQ ID NO: 5395 - protein, 9 aa, synthetic construct
GYNYYWQHA

SEQ ID NO: 5396 - protein, 9 aa, synthetic construct
GYTQQDEHF

SEQ ID NO: 5397 - protein, 9 aa, synthetic construct
HEGLIMRLE

SEQ ID NO: 5398 - protein, 9 aa, synthetic construct
HEVRRYGQN

SEQ ID NO: 5399 - protein, 9 aa, synthetic construct
HFEVRSVQR

SEQ ID NO: 5400 - protein, 9 aa, synthetic construct
HGFKCQYSF

SEQ ID NO: 5401 - protein, 9 aa, synthetic construct
HHRVNYEMY

SEQ ID NO: 5402 - protein, 9 aa, synthetic construct
HIGWMGWLR

SEQ ID NO: 5403 - protein, 9 aa, synthetic construct
HLMPRNQCF

SEQ ID NO: 5404 - protein, 9 aa, synthetic construct
HLWMCPPRY

SEQ ID NO: 5405 - protein, 9 aa, synthetic construct
HMGIAYNDH

SEQ ID NO: 5406 - protein, 9 aa, synthetic construct
HMSQAGVVS

SEQ ID NO: 5407 - protein, 9 aa, synthetic construct
HPLPNTEIC

SEQ ID NO: 5408 - protein, 9 aa, synthetic construct
HQSPIHTNT

SEQ ID NO: 5409 - protein, 9 aa, synthetic construct
HSLVQQLHP

SEQ ID NO: 5410 - protein, 9 aa, synthetic construct
HSTNLFEAK

SEQ ID NO: 5411 - protein, 9 aa, synthetic construct
HTLQWEAVR

SEQ ID NO: 5412 - protein, 9 aa, synthetic construct
HTRKEGFNS

SEQ ID NO: 5413 - protein, 9 aa, synthetic construct
HVTMNQLYS

SEQ ID NO: 5414 - protein, 9 aa, synthetic construct
IADDYFMCH

SEQ ID NO: 5415 - protein, 9 aa, synthetic construct
IAKIGNCVW

SEQ ID NO: 5416 - protein, 9 aa, synthetic construct
IAMRCWGNE

SEQ ID NO: 5417 - protein, 9 aa, synthetic construct
IATHNHILN

SEQ ID NO: 5418 - protein, 9 aa, synthetic construct
IATKSNCHK

SEQ ID NO: 5419 - protein, 9 aa, synthetic construct
ICNMDFRCA

SEQ ID NO: 5420 - protein, 9 aa, synthetic construct
IECSPRESI

SEQ ID NO: 5421 - protein, 9 aa, synthetic construct
IEHCSNRYA

SEQ ID NO: 5422 - protein, 9 aa, synthetic construct
IGQYFNFHF

SEQ ID NO: 5423 - protein, 9 aa, synthetic construct
IHFTSQSCL

SEQ ID NO: 5424 - protein, 9 aa, synthetic construct
IHGIDCYEI

SEQ ID NO: 5425 - protein, 9 aa, synthetic construct
IHPMMRENG

SEQ ID NO: 5426 - protein, 9 aa, synthetic construct
IIRQSEQYH

SEQ ID NO: 5427 - protein, 9 aa, synthetic construct
ILINDREWG

SEQ ID NO: 5428 - protein, 9 aa, synthetic construct
IMCHARMMA

SEQ ID NO: 5429 - protein, 9 aa, synthetic construct
IMNPTAQNN

SEQ ID NO: 5430 - protein, 9 aa, synthetic construct
IPAEWDSWR

SEQ ID NO: 5431 - protein, 9 aa, synthetic construct
IPRPFFTMH

SEQ ID NO: 5432 - protein, 9 aa, synthetic construct
IQAVMASGW

SEQ ID NO: 5433 - protein, 9 aa, synthetic construct
IRPQYAKMD

SEQ ID NO: 5434 - protein, 9 aa, synthetic construct
IRRSMQQQN

SEQ ID NO: 5435 - protein, 9 aa, synthetic construct
ISQRGTLWC

SEQ ID NO: 5436 - protein, 9 aa, synthetic construct
ISRMLRQSS

SEQ ID NO: 5437 - protein, 9 aa, synthetic construct
ISTKFGKEI

SEQ ID NO: 5438 - protein, 9 aa, synthetic construct
KAIWQGTEN

SEQ ID NO: 5439 - protein, 9 aa, synthetic construct
KALHYAMIK

SEQ ID NO: 5440 - protein, 9 aa, synthetic construct
KARQDDVNT

SEQ ID NO: 5441 - protein, 9 aa, synthetic construct
KATHCDKYV

SEQ ID NO: 5442 - protein, 9 aa, synthetic construct
KATVEGSWR

SEQ ID NO: 5443 - protein, 9 aa, synthetic construct
KAVLFLKDC

SEQ ID NO: 5444 - protein, 9 aa, synthetic construct
KCADLIIRS

SEQ ID NO: 5445 - protein, 9 aa, synthetic construct
KCLPYMEMF

SEQ ID NO: 5446 - protein, 9 aa, synthetic construct
KCNDIVLYH

SEQ ID NO: 5447 - protein, 9 aa, synthetic construct
KCNVITYHG

SEQ ID NO: 5448 - protein, 9 aa, synthetic construct
KCTMITPCF

SEQ ID NO: 5449 - protein, 9 aa, synthetic construct
KDGYREAWM

SEQ ID NO: 5450 - protein, 9 aa, synthetic construct
KDNQSCEWN

SEQ ID NO: 5451 - protein, 9 aa, synthetic construct
KEAYTDMSC

SEQ ID NO: 5452 - protein, 9 aa, synthetic construct
KENKIMQAS

SEQ ID NO: 5453 - protein, 9 aa, synthetic construct
KFGFMYNEF

SEQ ID NO: 5454 - protein, 9 aa, synthetic construct
KGEIEGGAK

SEQ ID NO: 5455 - protein, 9 aa, synthetic construct
KGLITENNY

SEQ ID NO: 5456 - protein, 9 aa, synthetic construct
KGTPNWWGP

SEQ ID NO: 5457 - protein, 9 aa, synthetic construct
KHITWNHCL

SEQ ID NO: 5458 - protein, 9 aa, synthetic construct
KHIVGQDGG

SEQ ID NO: 5459 - protein, 9 aa, synthetic construct
KHTLAEMYG

SEQ ID NO: 5460 - protein, 9 aa, synthetic construct
KIDAHSNME

SEQ ID NO: 5461 - protein, 9 aa, synthetic construct
KIGCMYSSQ

SEQ ID NO: 5462 - protein, 9 aa, synthetic construct
KIIFELGMD

SEQ ID NO: 5463 - protein, 9 aa, synthetic construct
KISPWDGFY

SEQ ID NO: 5464 - protein, 9 aa, synthetic construct
KIWAGVNLG

SEQ ID NO: 5465 - protein, 9 aa, synthetic construct
KIYMQCDQE

SEQ ID NO: 5466 - protein, 9 aa, synthetic construct
KKTECEMIV

SEQ ID NO: 5467 - protein, 9 aa, synthetic construct
KKTLYEMAC

SEQ ID NO: 5468 - protein, 9 aa, synthetic construct
KMAGIGCWY

SEQ ID NO: 5469 - protein, 9 aa, synthetic construct
KMCWWPESM

SEQ ID NO: 5470 - protein, 9 aa, synthetic construct
KMHGNERCF

SEQ ID NO: 5471 - protein, 9 aa, synthetic construct
KMLHKVWID

SEQ ID NO: 5472 - protein, 9 aa, synthetic construct
KMMAFEKQC

SEQ ID NO: 5473 - protein, 9 aa, synthetic construct
KMNTWDQAR

SEQ ID NO: 5474 - protein, 9 aa, synthetic construct
KNELENVIN

SEQ ID NO: 5475 - protein, 9 aa, synthetic construct
KPAGKNTCW

SEQ ID NO: 5476 - protein, 9 aa, synthetic construct
KPDHAMAQQ

SEQ ID NO: 5477 - protein, 9 aa, synthetic construct
KPLTYTVGS

SEQ ID NO: 5478 - protein, 9 aa, synthetic construct
KQKTQNRNA

SEQ ID NO: 5479 - protein, 9 aa, synthetic construct
KQLFMKFWN

SEQ ID NO: 5480 - protein, 9 aa, synthetic construct
KRTDLHAAD

SEQ ID NO: 5481 - protein, 9 aa, synthetic construct
KRVQQMETM

SEQ ID NO: 5482 - protein, 9 aa, synthetic construct
KRWLHMYQG

SEQ ID NO: 5483 - protein, 9 aa, synthetic construct
KSAPRENFN

SEQ ID NO: 5484 - protein, 9 aa, synthetic construct
KSGWGAPYE

SEQ ID NO: 5485 - protein, 9 aa, synthetic construct
KSMTCVYYP

SEQ ID NO: 5486 - protein, 9 aa, synthetic construct
KSTYYNLKW

SEQ ID NO: 5487 - protein, 9 aa, synthetic construct
KSVHYETCE

SEQ ID NO: 5488 - protein, 9 aa, synthetic construct
KSWVWVDTE

SEQ ID NO: 5489 - protein, 9 aa, synthetic construct
KTCLCIFTK

SEQ ID NO: 5490 - protein, 9 aa, synthetic construct
KTDPIAEYC

SEQ ID NO: 5491 - protein, 9 aa, synthetic construct
KTEKWASHE

SEQ ID NO: 5492 - protein, 9 aa, synthetic construct
KTFTKEVTP

SEQ ID NO: 5493 - protein, 9 aa, synthetic construct
KTLPFAIYH

SEQ ID NO: 5494 - protein, 9 aa, synthetic construct
KTMADMYNR

SEQ ID NO: 5495 - protein, 9 aa, synthetic construct
KTQTHTSEP

SEQ ID NO: 5496 - protein, 9 aa, synthetic construct
KTSNVMDQM

SEQ ID NO: 5497 - protein, 9 aa, synthetic construct
KTVETYAAH

SEQ ID NO: 5498 - protein, 9 aa, synthetic construct
KVAEGQNML

SEQ ID NO: 5499 - protein, 9 aa, synthetic construct
KVAGGHETT

SEQ ID NO: 5500 - protein, 9 aa, synthetic construct
KVDTVRNPK

SEQ ID NO: 5501 - protein, 9 aa, synthetic construct
KVESTTQLC

SEQ ID NO: 5502 - protein, 9 aa, synthetic construct
KWDDMHTQM

SEQ ID NO: 5503 - protein, 9 aa, synthetic construct
KYMQENVLS

SEQ ID NO: 5504 - protein, 9 aa, synthetic construct
LAAIQHCAM

SEQ ID NO: 5505 - protein, 9 aa, synthetic construct
LACTPRCIF

SEQ ID NO: 5506 - protein, 9 aa, synthetic construct
LADCMLNHH

SEQ ID NO: 5507 - protein, 9 aa, synthetic construct
LAESKKRNK

SEQ ID NO: 5508 - protein, 9 aa, synthetic construct
LATTTSYHC

SEQ ID NO: 5509 - protein, 9 aa, synthetic construct
LCTSTERQG

SEQ ID NO: 5510 - protein, 9 aa, synthetic construct
LEQLDRCMY

SEQ ID NO: 5511 - protein, 9 aa, synthetic construct
LFMTYSARN

SEQ ID NO: 5512 - protein, 9 aa, synthetic construct
LFYSPMHTH

SEQ ID NO: 5513 - protein, 9 aa, synthetic construct
LILQRNVKD

SEQ ID NO: 5514 - protein, 9 aa, synthetic construct
LLWRRVKRT

SEQ ID NO: 5515 - protein, 9 aa, synthetic construct
LNELPRAEY

SEQ ID NO: 5516 - protein, 9 aa, synthetic construct
LNHPIADYD

SEQ ID NO: 5517 - protein, 9 aa, synthetic construct
LPPPEEKWL

SEQ ID NO: 5518 - protein, 9 aa, synthetic construct
LPTQVYGHN

SEQ ID NO: 5519 - protein, 9 aa, synthetic construct
LTCMHASTP

SEQ ID NO: 5520 - protein, 9 aa, synthetic construct
LTPRSEGLP

SEQ ID NO: 5521 - protein, 9 aa, synthetic construct
LTQYKALAQ

SEQ ID NO: 5522 - protein, 9 aa, synthetic construct
LVGRTYQHQ

SEQ ID NO: 5523 - protein, 9 aa, synthetic construct
LWDRFCCPV

SEQ ID NO: 5524 - protein, 9 aa, synthetic construct
LWSRFISMD

SEQ ID NO: 5525 - protein, 9 aa, synthetic construct
LYMMALLPT

SEQ ID NO: 5526 - protein, 9 aa, synthetic construct
MAAITQNVA

SEQ ID NO: 5527 - protein, 9 aa, synthetic construct
MAGHIGHHS

SEQ ID NO: 5528 - protein, 9 aa, synthetic construct
MAQPYGRTA

SEQ ID NO: 5529 - protein, 9 aa, synthetic construct
MARQCHSFH

SEQ ID NO: 5530 - protein, 9 aa, synthetic construct
MCRPVMMIE

SEQ ID NO: 5531 - protein, 9 aa, synthetic construct
MCSQTISMR

SEQ ID NO: 5532 - protein, 9 aa, synthetic construct
MDGHFSVGC

SEQ ID NO: 5533 - protein, 9 aa, synthetic construct
MDGRDEIIH

SEQ ID NO: 5534 - protein, 9 aa, synthetic construct
MDPDIPHCR

SEQ ID NO: 5535 - protein, 9 aa, synthetic construct
MDVQQIISG

SEQ ID NO: 5536 - protein, 9 aa, synthetic construct
MEHTMDFGV

SEQ ID NO: 5537 - protein, 9 aa, synthetic construct
MFDMMSVLK

SEQ ID NO: 5538 - protein, 9 aa, synthetic construct
MFVVNQNWA

SEQ ID NO: 5539 - protein, 9 aa, synthetic construct
MGQRSAANY

SEQ ID NO: 5540 - protein, 9 aa, synthetic construct
MGRPHAWWG

SEQ ID NO: 5541 - protein, 9 aa, synthetic construct
MIKPLLVVG

SEQ ID NO: 5542 - protein, 9 aa, synthetic construct
MIRPSINGS

SEQ ID NO: 5543 - protein, 9 aa, synthetic construct
MKNQPTGAS

SEQ ID NO: 5544 - protein, 9 aa, synthetic construct
MKTIMQDYF

SEQ ID NO: 5545 - protein, 9 aa, synthetic construct
MLFDFEEHN

SEQ ID NO: 5546 - protein, 9 aa, synthetic construct
MLGVAPGHL

SEQ ID NO: 5547 - protein, 9 aa, synthetic construct
MLPLEMKNL

SEQ ID NO: 5548 - protein, 9 aa, synthetic construct
MMVRELMSS

SEQ ID NO: 5549 - protein, 9 aa, synthetic construct
MPSWYIAQA

SEQ ID NO: 5550 - protein, 9 aa, synthetic construct
MQHLPPAMT

SEQ ID NO: 5551 - protein, 9 aa, synthetic construct
MQLRIHTNS

SEQ ID NO: 5552 - protein, 9 aa, synthetic construct
MQYRGMSAS

SEQ ID NO: 5553 - protein, 9 aa, synthetic construct
MRQRTYICQ

SEQ ID NO: 5554 - protein, 9 aa, synthetic construct
MRRKTPEDD

SEQ ID NO: 5555 - protein, 9 aa, synthetic construct
MRYHWDEAG

SEQ ID NO: 5556 - protein, 9 aa, synthetic construct
MSLQHHFCT

SEQ ID NO: 5557 - protein, 9 aa, synthetic construct
MSNLEYYEA

SEQ ID NO: 5558 - protein, 9 aa, synthetic construct
MTDNNGPLF

SEQ ID NO: 5559 - protein, 9 aa, synthetic construct
MTGIGKCWN

SEQ ID NO: 5560 - protein, 9 aa, synthetic construct
MTRSCQTEG

SEQ ID NO: 5561 - protein, 9 aa, synthetic construct
MYTGMRCWR

SEQ ID NO: 5562 - protein, 9 aa, synthetic construct
NAGMKGVDV

SEQ ID NO: 5563 - protein, 9 aa, synthetic construct
NAGVVKVWP

SEQ ID NO: 5564 - protein, 9 aa, synthetic construct
NAIPYFVQA

SEQ ID NO: 5565 - protein, 9 aa, synthetic construct
NAKYSMLYG

SEQ ID NO: 5566 - protein, 9 aa, synthetic construct
NAQRLAVGM

SEQ ID NO: 5567 - protein, 9 aa, synthetic construct
NARVMAKRE

SEQ ID NO: 5568 - protein, 9 aa, synthetic construct
NCPMYDMIS

SEQ ID NO: 5569 - protein, 9 aa, synthetic construct
NERDQCQWP

SEQ ID NO: 5570 - protein, 9 aa, synthetic construct
NHSLCWDSK

SEQ ID NO: 5571 - protein, 9 aa, synthetic construct
NLERCNTMM

SEQ ID NO: 5572 - protein, 9 aa, synthetic construct
NMWYSFVMI

SEQ ID NO: 5573 - protein, 9 aa, synthetic construct
NQREWHGLA

SEQ ID NO: 5574 - protein, 9 aa, synthetic construct
NQRGFCKDE

SEQ ID NO: 5575 - protein, 9 aa, synthetic construct
NRCGVSKCC

SEQ ID NO: 5576 - protein, 9 aa, synthetic construct
NRIQMTDFQ

SEQ ID NO: 5577 - protein, 9 aa, synthetic construct
NSTRNTSYY

SEQ ID NO: 5578 - protein, 9 aa, synthetic construct
NSTRWYHTG

SEQ ID NO: 5579 - protein, 9 aa, synthetic construct
NTAKLGWGL

SEQ ID NO: 5580 - protein, 9 aa, synthetic construct
NTCEGWSHF

SEQ ID NO: 5581 - protein, 9 aa, synthetic construct
NTGVKFCAC

SEQ ID NO: 5582 - protein, 9 aa, synthetic construct
NTQYSAKND

SEQ ID NO: 5583 - protein, 9 aa, synthetic construct
NTRIVCDLS

SEQ ID NO: 5584 - protein, 9 aa, synthetic construct
NTSELLMAQ

SEQ ID NO: 5585 - protein, 9 aa, synthetic construct
NVCDNGHEI

SEQ ID NO: 5586 - protein, 9 aa, synthetic construct
NVFPAETHV

SEQ ID NO: 5587 - protein, 9 aa, synthetic construct
NVMGTQAKE

SEQ ID NO: 5588 - protein, 9 aa, synthetic construct
NVTTMFGQK

SEQ ID NO: 5589 - protein, 9 aa, synthetic construct
NWEVIGRWH

SEQ ID NO: 5590 - protein, 9 aa, synthetic construct
NWNHCHQWR

SEQ ID NO: 5591 - protein, 9 aa, synthetic construct
NWTGNMQWA

SEQ ID NO: 5592 - protein, 9 aa, synthetic construct
NYCKYNKMR

SEQ ID NO: 5593 - protein, 9 aa, synthetic construct
PAWRRYCWT

SEQ ID NO: 5594 - protein, 9 aa, synthetic construct
PEKWIHMHE

SEQ ID NO: 5595 - protein, 9 aa, synthetic construct
PIHTYKRHP

SEQ ID NO: 5596 - protein, 9 aa, synthetic construct
PIKGVAVQE

SEQ ID NO: 5597 - protein, 9 aa, synthetic construct
PLNQEQIPQ

SEQ ID NO: 5598 - protein, 9 aa, synthetic construct
PRNLVAMYW

SEQ ID NO: 5599 - protein, 9 aa, synthetic construct
PVKPIIHAS

SEQ ID NO: 5600 - protein, 9 aa, synthetic construct
PWMHTMLNP

SEQ ID NO: 5601 - protein, 9 aa, synthetic construct
QAAVTKEYW

SEQ ID NO: 5602 - protein, 9 aa, synthetic construct
QAKMILDGT

SEQ ID NO: 5603 - protein, 9 aa, synthetic construct
QANPYNHGI

SEQ ID NO: 5604 - protein, 9 aa, synthetic construct
QAVIAVDGR

SEQ ID NO: 5605 - protein, 9 aa, synthetic construct
QCAHFYQTR

SEQ ID NO: 5606 - protein, 9 aa, synthetic construct
QCGCAPMDS

SEQ ID NO: 5607 - protein, 9 aa, synthetic construct
QCGFIRLNE

SEQ ID NO: 5608 - protein, 9 aa, synthetic construct
QCQSQEWFH

SEQ ID NO: 5609 - protein, 9 aa, synthetic construct
QDCERQVFA

SEQ ID NO: 5610 - protein, 9 aa, synthetic construct
QEAGYTRHN

SEQ ID NO: 5611 - protein, 9 aa, synthetic construct
QFCICCDGM

SEQ ID NO: 5612 - protein, 9 aa, synthetic construct
QGENAQHHN

SEQ ID NO: 5613 - protein, 9 aa, synthetic construct
QGFSTDVKP

SEQ ID NO: 5614 - protein, 9 aa, synthetic construct
QGQHVMVHS

SEQ ID NO: 5615 - protein, 9 aa, synthetic construct
QHLMTFSHE

SEQ ID NO: 5616 - protein, 9 aa, synthetic construct
QHQAFFVFT

SEQ ID NO: 5617 - protein, 9 aa, synthetic construct
QIKTHSNVF

SEQ ID NO: 5618 - protein, 9 aa, synthetic construct
QKPTIWDHF

SEQ ID NO: 5619 - protein, 9 aa, synthetic construct
QKSMLNSIQ

SEQ ID NO: 5620 - protein, 9 aa, synthetic construct
QLKRNEQTS

SEQ ID NO: 5621 - protein, 9 aa, synthetic construct
QMKGATEFC

SEQ ID NO: 5622 - protein, 9 aa, synthetic construct
QMNAIQLCV

SEQ ID NO: 5623 - protein, 9 aa, synthetic construct
QMVTQLNWE

SEQ ID NO: 5624 - protein, 9 aa, synthetic construct
QNKHNWWIM

SEQ ID NO: 5625 - protein, 9 aa, synthetic construct
QPKMWMMAS

SEQ ID NO: 5626 - protein, 9 aa, synthetic construct
QPRVYEGFY

SEQ ID NO: 5627 - protein, 9 aa, synthetic construct
QPYWVAVDP

SEQ ID NO: 5628 - protein, 9 aa, synthetic construct
QQTWEQMQR

SEQ ID NO: 5629 - protein, 9 aa, synthetic construct
QRGPLQHQQ

SEQ ID NO: 5630 - protein, 9 aa, synthetic construct
QRNNLFVHD

SEQ ID NO: 5631 - protein, 9 aa, synthetic construct
QSAHPEPMC

SEQ ID NO: 5632 - protein, 9 aa, synthetic construct
QSGTCHYHD

SEQ ID NO: 5633 - protein, 9 aa, synthetic construct
QSRQMMLLH

SEQ ID NO: 5634 - protein, 9 aa, synthetic construct
QSTPTLGPK

SEQ ID NO: 5635 - protein, 9 aa, synthetic construct
QSWWHSDTC

SEQ ID NO: 5636 - protein, 9 aa, synthetic construct
QTDILRDVQ

SEQ ID NO: 5637 - protein, 9 aa, synthetic construct
QTGTGHWFE

SEQ ID NO: 5638 - protein, 9 aa, synthetic construct
QTGVMAAFG

SEQ ID NO: 5639 - protein, 9 aa, synthetic construct
QTLGGHMWT

SEQ ID NO: 5640 - protein, 9 aa, synthetic construct
QVACHMTNP

SEQ ID NO: 5641 - protein, 9 aa, synthetic construct
QVHIGSWPP

SEQ ID NO: 5642 - protein, 9 aa, synthetic construct
QVMQEKVRC

SEQ ID NO: 5643 - protein, 9 aa, synthetic construct
QVNMFMMPC

SEQ ID NO: 5644 - protein, 9 aa, synthetic construct
QVRFEQNPA

SEQ ID NO: 5645 - protein, 9 aa, synthetic construct
QVSFVGCNH

SEQ ID NO: 5646 - protein, 9 aa, synthetic construct
QVSHISEHW

SEQ ID NO: 5647 - protein, 9 aa, synthetic construct
QWAPLQTWA

SEQ ID NO: 5648 - protein, 9 aa, synthetic construct
QWEEVWWEA

SEQ ID NO: 5649 - protein, 9 aa, synthetic construct
QYLLIPHLP

SEQ ID NO: 5650 - protein, 9 aa, synthetic construct
QYQSTGVVR

SEQ ID NO: 5651 - protein, 9 aa, synthetic construct
QYWWPATHD

SEQ ID NO: 5652 - protein, 9 aa, synthetic construct
RAERYFKDE

SEQ ID NO: 5653 - protein, 9 aa, synthetic construct
RAIYNDMTE

SEQ ID NO: 5654 - protein, 9 aa, synthetic construct
RCVQAHFHK

SEQ ID NO: 5655 - protein, 9 aa, synthetic construct
RDIWERPCV

SEQ ID NO: 5656 - protein, 9 aa, synthetic construct
REEWKNASN

SEQ ID NO: 5657 - protein, 9 aa, synthetic construct
REMMIVNCD

SEQ ID NO: 5658 - protein, 9 aa, synthetic construct
RGKPILNQQ

SEQ ID NO: 5659 - protein, 9 aa, synthetic construct
RITQGESGM

SEQ ID NO: 5660 - protein, 9 aa, synthetic construct
RKWMNAKAT

SEQ ID NO: 5661 - protein, 9 aa, synthetic construct
RLAWIEQSP

SEQ ID NO: 5662 - protein, 9 aa, synthetic construct
RMMWQSHCG

SEQ ID NO: 5663 - protein, 9 aa, synthetic construct
RMVLAYGNF

SEQ ID NO: 5664 - protein, 9 aa, synthetic construct
RNDWQQVFS

SEQ ID NO: 5665 - protein, 9 aa, synthetic construct
RQTTYDCLD

SEQ ID NO: 5666 - protein, 9 aa, synthetic construct
RREAMDDSP

SEQ ID NO: 5667 - protein, 9 aa, synthetic construct
RSDEMYVTP

SEQ ID NO: 5668 - protein, 9 aa, synthetic construct
RTRISQMFG

SEQ ID NO: 5669 - protein, 9 aa, synthetic construct
RTVPTQEMS

SEQ ID NO: 5670 - protein, 9 aa, synthetic construct
RVAGEGIQP

SEQ ID NO: 5671 - protein, 9 aa, synthetic construct
RVWSLEWHL

SEQ ID NO: 5672 - protein, 9 aa, synthetic construct
RYNNCPNLW

SEQ ID NO: 5673 - protein, 9 aa, synthetic construct
RYQSHCWLH

SEQ ID NO: 5674 - protein, 9 aa, synthetic construct
SADRTAMFH

SEQ ID NO: 5675 - protein, 9 aa, synthetic construct
SALYRWGHV

SEQ ID NO: 5676 - protein, 9 aa, synthetic construct
SANQRYHDW

SEQ ID NO: 5677 - protein, 9 aa, synthetic construct
SAPRNEITR

SEQ ID NO: 5678 - protein, 9 aa, synthetic construct
SCQLLNDGG

SEQ ID NO: 5679 - protein, 9 aa, synthetic construct
SFKSVSQYN

SEQ ID NO: 5680 - protein, 9 aa, synthetic construct
SFPMILVNC

SEQ ID NO: 5681 - protein, 9 aa, synthetic construct
SIAQDQVWS

SEQ ID NO: 5682 - protein, 9 aa, synthetic construct
SIRYDFYVP

SEQ ID NO: 5683 - protein, 9 aa, synthetic construct
SIYQKWVTN

SEQ ID NO: 5684 - protein, 9 aa, synthetic construct
SKGDLCHQQ

SEQ ID NO: 5685 - protein, 9 aa, synthetic construct
SKGWADPCP

SEQ ID NO: 5686 - protein, 9 aa, synthetic construct
SMQYFFKTE

SEQ ID NO: 5687 - protein, 9 aa, synthetic construct
SMRDLIAEA

SEQ ID NO: 5688 - protein, 9 aa, synthetic construct
SMSHNGQCL

SEQ ID NO: 5689 - protein, 9 aa, synthetic construct
SNRYYSRIF

SEQ ID NO: 5690 - protein, 9 aa, synthetic construct
SPNGRGLCG

SEQ ID NO: 5691 - protein, 9 aa, synthetic construct
SQIQIRQAD

SEQ ID NO: 5692 - protein, 9 aa, synthetic construct
SQMKYAHNQ

SEQ ID NO: 5693 - protein, 9 aa, synthetic construct
SQSRTIIQE

SEQ ID NO: 5694 - protein, 9 aa, synthetic construct
SRDIAKSST

SEQ ID NO: 5695 - protein, 9 aa, synthetic construct
SRLYKKRLF

SEQ ID NO: 5696 - protein, 9 aa, synthetic construct
SRTRMYMDH

SEQ ID NO: 5697 - protein, 9 aa, synthetic construct
SRVMIHVYV

SEQ ID NO: 5698 - protein, 9 aa, synthetic construct
SSVVMAKQP

SEQ ID NO: 5699 - protein, 9 aa, synthetic construct
STLEDEKPY

SEQ ID NO: 5700 - protein, 9 aa, synthetic construct
STQKVPVLA

SEQ ID NO: 5701 - protein, 9 aa, synthetic construct
STRPIACHS

SEQ ID NO: 5702 - protein, 9 aa, synthetic construct
SVETARCSG

SEQ ID NO: 5703 - protein, 9 aa, synthetic construct
SVGYIYDQS

SEQ ID NO: 5704 - protein, 9 aa, synthetic construct
SVKDPMDWG

SEQ ID NO: 5705 - protein, 9 aa, synthetic construct
SVTPDSITT

SEQ ID NO: 5706 - protein, 9 aa, synthetic construct
TAGQQPTFM

SEQ ID NO: 5707 - protein, 9 aa, synthetic construct
TARDREHAM

SEQ ID NO: 5708 - protein, 9 aa, synthetic construct
TARSTSDKC

SEQ ID NO: 5709 - protein, 9 aa, synthetic construct
TCKWYEESI

SEQ ID NO: 5710 - protein, 9 aa, synthetic construct
TCTNSEPHP

SEQ ID NO: 5711 - protein, 9 aa, synthetic construct
TCYCHRAHE

SEQ ID NO: 5712 - protein, 9 aa, synthetic construct
TEEVQFVVH

SEQ ID NO: 5713 - protein, 9 aa, synthetic construct
TFMFNSEWS

SEQ ID NO: 5714 - protein, 9 aa, synthetic construct
TFMRKICGM

SEQ ID NO: 5715 - protein, 9 aa, synthetic construct
TFVRKPSLM

SEQ ID NO: 5716 - protein, 9 aa, synthetic construct
THSSCWYQD

SEQ ID NO: 5717 - protein, 9 aa, synthetic construct
TISQIPWVR

SEQ ID NO: 5718 - protein, 9 aa, synthetic construct
TKLSMMGCE

SEQ ID NO: 5719 - protein, 9 aa, synthetic construct
TKQFFTAHC

SEQ ID NO: 5720 - protein, 9 aa, synthetic construct
TKYHYHVKV

SEQ ID NO: 5721 - protein, 9 aa, synthetic construct
TLEPAYRHE

SEQ ID NO: 5722 - protein, 9 aa, synthetic construct
TLLLVGKDR

SEQ ID NO: 5723 - protein, 9 aa, synthetic construct
TMAQKGLWF

SEQ ID NO: 5724 - protein, 9 aa, synthetic construct
TMPDRDPTY

SEQ ID NO: 5725 - protein, 9 aa, synthetic construct
TMRLFWDMG

SEQ ID NO: 5726 - protein, 9 aa, synthetic construct
TNFPTSMHG

SEQ ID NO: 5727 - protein, 9 aa, synthetic construct
TPKSEGICC

SEQ ID NO: 5728 - protein, 9 aa, synthetic construct
TQAKIECCS

SEQ ID NO: 5729 - protein, 9 aa, synthetic construct
TQEACHHDP

SEQ ID NO: 5730 - protein, 9 aa, synthetic construct
TQNACKVRT

SEQ ID NO: 5731 - protein, 9 aa, synthetic construct
TRHPTIAMH

SEQ ID NO: 5732 - protein, 9 aa, synthetic construct
TRILNEFFC

SEQ ID NO: 5733 - protein, 9 aa, synthetic construct
TSEPHCSYA

SEQ ID NO: 5734 - protein, 9 aa, synthetic construct
TSERHSCMV

SEQ ID NO: 5735 - protein, 9 aa, synthetic construct
TSMEFTQHQ

SEQ ID NO: 5736 - protein, 9 aa, synthetic construct
TSNHNMALE

SEQ ID NO: 5737 - protein, 9 aa, synthetic construct
TTAYHRSDH

SEQ ID NO: 5738 - protein, 9 aa, synthetic construct
TTTITNRLC

SEQ ID NO: 5739 - protein, 9 aa, synthetic construct
TTTNQFMFQ

SEQ ID NO: 5740 - protein, 9 aa, synthetic construct
TVCGSFHGC

SEQ ID NO: 5741 - protein, 9 aa, synthetic construct
TVIRDSRSY

SEQ ID NO: 5742 - protein, 9 aa, synthetic construct
TVRHQMDAY

SEQ ID NO: 5743 - protein, 9 aa, synthetic construct
TVTHMSTWG

SEQ ID NO: 5744 - protein, 9 aa, synthetic construct
TWHKQLVGV

SEQ ID NO: 5745 - protein, 9 aa, synthetic construct
TYASTRNFH

SEQ ID NO: 5746 - protein, 9 aa, synthetic construct
TYDTRNHCL

SEQ ID NO: 5747 - protein, 9 aa, synthetic construct
TYLHQPEDS

SEQ ID NO: 5748 - protein, 9 aa, synthetic construct
TYWCPLMMN

SEQ ID NO: 5749 - protein, 9 aa, synthetic construct
VAADSRMMI

SEQ ID NO: 5750 - protein, 9 aa, synthetic construct
VADTWQVHC

SEQ ID NO: 5751 - protein, 9 aa, synthetic construct
VADWIGHTP

SEQ ID NO: 5752 - protein, 9 aa, synthetic construct
VAYPIQTDV

SEQ ID NO: 5753 - protein, 9 aa, synthetic construct
VCGWWHQYW

SEQ ID NO: 5754 - protein, 9 aa, synthetic construct
VCHNPDPFT

SEQ ID NO: 5755 - protein, 9 aa, synthetic construct
VFGSTRSAA

SEQ ID NO: 5756 - protein, 9 aa, synthetic construct
VFNLMLQDK

SEQ ID NO: 5757 - protein, 9 aa, synthetic construct
VGIWFIPCR

SEQ ID NO: 5758 - protein, 9 aa, synthetic construct
VHVHCMIGS

SEQ ID NO: 5759 - protein, 9 aa, synthetic construct
VICRMKKHS

SEQ ID NO: 5760 - protein, 9 aa, synthetic construct
VIKVNTVNP

SEQ ID NO: 5761 - protein, 9 aa, synthetic construct
VKAWWHDHQ

SEQ ID NO: 5762 - protein, 9 aa, synthetic construct
VKHTAVDVP

SEQ ID NO: 5763 - protein, 9 aa, synthetic construct
VLKSCDRHG

SEQ ID NO: 5764 - protein, 9 aa, synthetic construct
VMFYWRYNS

SEQ ID NO: 5765 - protein, 9 aa, synthetic construct
VPMWAHWQN

SEQ ID NO: 5766 - protein, 9 aa, synthetic construct
VPTGRRVKL

SEQ ID NO: 5767 - protein, 9 aa, synthetic construct
VPVATMIHH

SEQ ID NO: 5768 - protein, 9 aa, synthetic construct
VRADNMPVM

SEQ ID NO: 5769 - protein, 9 aa, synthetic construct
VSAYIERQW

SEQ ID NO: 5770 - protein, 9 aa, synthetic construct
VSKFIAASW

SEQ ID NO: 5771 - protein, 9 aa, synthetic construct
VSRCGIDRS

SEQ ID NO: 5772 - protein, 9 aa, synthetic construct
VSVQSRAQL

SEQ ID NO: 5773 - protein, 9 aa, synthetic construct
VTMTTKSVW

SEQ ID NO: 5774 - protein, 9 aa, synthetic construct
VWWMIIHTS

SEQ ID NO: 5775 - protein, 9 aa, synthetic construct
WAIFGDIHH

SEQ ID NO: 5776 - protein, 9 aa, synthetic construct
WAYYIRLQP

SEQ ID NO: 5777 - protein, 9 aa, synthetic construct
WCEAVGDYA

SEQ ID NO: 5778 - protein, 9 aa, synthetic construct
WCESWGPQG

SEQ ID NO: 5779 - protein, 9 aa, synthetic construct
WCRCKRFIE

SEQ ID NO: 5780 - protein, 9 aa, synthetic construct
WDGRPDLST

SEQ ID NO: 5781 - protein, 9 aa, synthetic construct
WFSIIMSKL

SEQ ID NO: 5782 - protein, 9 aa, synthetic construct
WINEANCLM

SEQ ID NO: 5783 - protein, 9 aa, synthetic construct
WIRSAQRPG

SEQ ID NO: 5784 - protein, 9 aa, synthetic construct
WKDDLRSTY

SEQ ID NO: 5785 - protein, 9 aa, synthetic construct
WKWYGLPHH

SEQ ID NO: 5786 - protein, 9 aa, synthetic construct
WPNIKHQPI

SEQ ID NO: 5787 - protein, 9 aa, synthetic construct
WPTMLSAHM

SEQ ID NO: 5788 - protein, 9 aa, synthetic construct
WSCRSICPP

SEQ ID NO: 5789 - protein, 9 aa, synthetic construct
WVEPEQCFG

SEQ ID NO: 5790 - protein, 9 aa, synthetic construct
WVKQKDVLC

SEQ ID NO: 5791 - protein, 9 aa, synthetic construct
WVYSHEKHY

SEQ ID NO: 5792 - protein, 9 aa, synthetic construct
YDLWGWSTR

SEQ ID NO: 5793 - protein, 9 aa, synthetic construct
YDYWMQAPT

SEQ ID NO: 5794 - protein, 9 aa, synthetic construct
YEHPIMWPV

SEQ ID NO: 5795 - protein, 9 aa, synthetic construct
YEICKHGHF

SEQ ID NO: 5796 - protein, 9 aa, synthetic construct
YFADAWLKT

SEQ ID NO: 5797 - protein, 9 aa, synthetic construct
YFPSIQCYE

SEQ ID NO: 5798 - protein, 9 aa, synthetic construct
YGGSEHWGP

SEQ ID NO: 5799 - protein, 9 aa, synthetic construct
YGNSVTCTS

SEQ ID NO: 5800 - protein, 9 aa, synthetic construct
YHCCFAMQS

SEQ ID NO: 5801 - protein, 9 aa, synthetic construct
YMSWYQIRN

SEQ ID NO: 5802 - protein, 9 aa, synthetic construct
YPAQYTAFS

SEQ ID NO: 5803 - protein, 9 aa, synthetic construct
YPQPCSCHS

SEQ ID NO: 5804 - protein, 9 aa, synthetic construct
YPVHMMPPL

SEQ ID NO: 5805 - protein, 9 aa, synthetic construct
YRDRCWNRI

SEQ ID NO: 5806 - protein, 9 aa, synthetic construct
YTELMKKAC

SEQ ID NO: 5807 - protein, 9 aa, synthetic construct
YTNHYYNAR

SEQ ID NO: 5808 - protein, 9 aa, synthetic construct
DDFGTLPRM

SEQ ID NO: 5809 - protein, 9 aa, synthetic construct
GIIQVRMEW

SEQ ID NO: 5810 - protein, 9 aa, synthetic construct
GQFEDLLVL

SEQ ID NO: 5811 - protein, 9 aa, synthetic construct
RKEGCTSHG

SEQ ID NO: 5812 - protein, 20 aa, synthetic construct
VAYNVGGQMATNNQSSTTAP

SEQ ID NO: 5813 - protein, 20 aa, synthetic construct
IVPGSVWMERDVYLQGPIWA

SEQ ID NO: 5814 - protein, 9 aa, synthetic construct
MACKVHLQP

SEQ ID NO: 5815 - protein, 9 aa, synthetic construct
SYKMIHNTA

SEQ ID NO: 5816 - protein, 9 aa, synthetic construct
QKMPNNMYG

SEQ ID NO: 5817 - protein, 9 aa, synthetic construct
KTGTRDSAR

1-139. (canceled)

140. A viral protein (VP) capsid polypeptide comprising a sequence that has at least 85% identity to any one of SEQ ID NO: 1971, SEQ ID NO: 3283, SEQ ID NO: 12-SEQ ID NO: 1970, SEQ ID NO: 1972-SEQ ID NO: 3282, or SEQ ID NO: 3284-SEQ ID NO: 4237.

141. The VP capsid polypeptide of claim 140, comprising the sequence of any one of SEQ ID NO: 1971, SEQ ID NO: 3283, SEQ ID NO: 12-SEQ ID NO: 1970, SEQ ID NO: 1972-SEQ ID NO: 3282, or SEQ ID NO: 3284-SEQ ID NO: 4237.

142. The VP capsid polypeptide of claim 140, wherein the VP capsid polypeptide comprises a 581-589 region corresponding to residues 581 to 589 of a VP1 polypeptide; wherein the 581-589 region has a sequence that is at least 85% identical to any one of any one SEQ ID NO: 1971, SEQ ID NO: 3283, SEQ ID NO: 12-SEQ ID NO: 1970, SEQ ID NO: 1972-SEQ ID NO: 3282, or SEQ ID NO: 3284-SEQ ID NO: 4237.

143. The VP capsid polypeptide of claim 142, wherein the VP capsid polypeptide comprises a 581-589 region corresponding to residues 581 to 589 of a VP1 polypeptide; wherein the 581-589 region has a sequence of any one of any one SEQ ID NO: 1971, SEQ ID NO: 3283, SEQ ID NO: 12-SEQ ID NO: 1970, SEQ ID NO: 1972-SEQ ID NO: 3282, or SEQ ID NO: 3284-SEQ ID NO: 4237.

144. The VP capsid polypeptide of claim 140, wherein the VP capsid polypeptide is capable of preferentially targeting a central nervous system (CNS) tissue at a DNA enrichment or RNA enrichment of at least 100-fold greater than a wild type AAV9.

145. The VP capsid polypeptide of claim 140, wherein the VP capsid polypeptide is capable of preferentially targeting a central nervous system (CNS) tissue at a DNA enrichment or RNA enrichment of at least 5-fold greater than a wild type AAV5.

146. The VP capsid polypeptide of claim 140, wherein the VP capsid polypeptide confers on a recombinant viral capsid an infection rate for central nervous system (CNS) tissue with at least 3-fold higher CNS tissue tropism than a wild type VP capsid polypeptide of SEQ ID NO: 1.

147. The VP capsid polypeptide of claim 146, wherein the CNS tissue is selected from forebrain cortex, occipital cortex, temporal cortex, thalamus, hypothalamus, substantia nigra, hippocampus DG, hippocampus CA1, hippocampus CA3, cerebellum, and any combination thereof.

148. A pharmaceutical composition comprising the VP capsid polypeptide of claim 140.

149. The pharmaceutical composition of claim 148, wherein the VP capsid polypeptide is assembled into a recombinant viral capsid.

150. A recombinant adeno-associated virus (rAAV), comprising the VP capsid polypeptide of claim 140, assembled into a recombinant viral capsid and a payload encapsidated by the recombinant viral capsid.

151. The rAAV of claim 150, wherein the payload encodes a therapeutic protein, therapeutic polynucleotide, a guide RNA, a tRNA, a suppressor tRNA, a siRNA, a miRNA, an mRNA, a shRNA, a circular RNA, an antisense oligonucleotide (ASO), a ribozyme, a DNAzyme, an aptamer, or any combination thereof.

152. The rAAV of claim 151, wherein the guide RNA is a CRISPR/Cas guide RNA or an ADAR guide RNA.

153. The rAAV of claim 151, wherein the therapeutic protein is selected from the group consisting of aromatic l-amino acid decarboxylase (AADC), amyloid precursor protein (APP), α-synuclein, microtubule associated protein tau (MAPT), ApoE, nerve growth factor (NGF), telomerase reverse transcriptase (TERT), CLN2, CLN3, CLN6, N-acetyl-α-glucosaminidase (NAGLU), granulin, glucosylceramidase 8 (GBA), aspartoacylase, GDNF, neurturin (NTN), glutamate decarboxylase (GAD), FOXG1, Kᵥ7.2, laforin, leucine rich repeat kinase 2 (LRRK2), hexosaminidase A (HEXA), hexosaminidase B (HEXB), huntingtin, cholesterol 24-hydroxylase, C9orf72, superoxide dismutase 1 (SOD1), dual specificity tyrosine-phosphorylation-regulated kinase 1A (DYRKA1), N-sulfoglucosamine sulfohydrolase (SGSH), surfeit locus protein 1 (SURF1), GABA transporter 1 (GAT1), and methyl-CpG binding protein 2 (MECP2).

154. The rAAV of claim 151, wherein the therapeutic polynucleotide targets an mRNA encoding a protein selected from the group consisting of aromatic l-amino acid decarboxylase (AADC), amyloid precursor protein (APP), α-synuclein, microtubule associated protein tau (MAPT), ApoE, nerve growth factor (NGF), telomerase reverse transcriptase (TERT), CLN2, CLN3, CLN6, N-acetyl-α-glucosaminidase (NAGLU), granulin, glucosylceramidase B (GBA), aspartoacylase, GDNF, neurturin (NTN), glutamate decarboxylase (GAD), FOXG1, Kᵥ7.2, laforin, leucine rich repeat kinase 2 (LRRK2), hexosaminidase A (HEXA), hexosaminidase B (HEXB), huntingtin, cholesterol 24-hydroxylase, C9orf72, superoxide dismutase 1 (SOD1), dual specificity tyrosine-phosphorylation-regulated kinase 1A (DYRKA1), N-sulfoglucosamine sulfohydrolase (SGSH), surfeit locus protein 1 (SURF1), GABA transporter 1 (GAT1), and methyl-CpG binding protein 2 (MECP2).

155. The rAAV of any one of claim 151, wherein the payload encodes a component of a CRISPR/Cas system, an adenosine deaminase acting on RNA (ADAR) enzyme, a transcriptional activator, or a transcriptional repressor.

156. The rAAV of claim 155, wherein the component of the CRISPR/Cas system comprises a Cas3, a Cas8, a Cas10, a Cas9, a Cas4, a Cas12, a Cas13, a guide RNA, or a combination thereof.

157. A method of delivering a payload to a central nervous system (CNS) tissue of a subject, the method comprising:
administering a recombinant adeno-associated virus (rAAV) to the subject, wherein the rAAV encapsidates the payload, and wherein the rAAV comprises the viral protein (VP) capsid polypeptide of claim 140;
infecting the CNS tissue with the rAAV; and
thereby delivering a payload to the CNS.

158. A method of transcribing a payload to a central nervous system (CNS) tissue of a subject, the method comprising:
administering a recombinant adeno-associated virus (rAAV) to the subject, wherein the rAAV encapsidates the payload, and wherein the rAAV comprises the viral protein (VP) capsid polypeptide of claim 140;
infecting the CNS tissue with the rAAV; and
preferentially transcribing the payload to the CNS tissue infected by the rAAV.

159. A method of transcribing a payload to a muscle tissue of a subject, the method comprising:
administering a recombinant adeno-associated virus (rAAV) to the subject, wherein the rAAV encapsidates the payload, and wherein the rAAV comprises the viral protein (VP) capsid polypeptide of claim 140;
infecting the muscle tissue with the rAAV; and
preferentially transcribing the payload to the muscle tissue infected by the rAAV.

160. The method of claim 159, wherein the muscle tissue is skeletal muscle tissue or cardiac muscle tissue.

161. A method of treating a condition in a subject, the method comprising:
administering a recombinant adeno-associated virus (rAAV) to the subject, wherein the rAAV encapsidates a payload, and wherein the rAAV comprises a viral protein (VP) capsid polypeptide comprising a sequence that has at least 85% identity to any one of SEQ ID NO: 1971, SEQ ID NO: 3283, SEQ ID NO: 12-SEQ ID NO: 1970, SEQ ID NO: 1972-SEQ ID NO: 3282, or SEQ ID NO: 3284-SEQ ID NO: 4237;
infecting a CNS tissue with the rAAV; and
delivering the payload to the CNS infected by the rAAV; and
producing a therapeutic effect in the CNS tissue, thereby treating the condition.

162. The method of claim 161, wherein the condition is a neurological condition, comprising an aromatic l-amino acid decarboxylase (AADC) deficiency, Alzheimer's disease, a tauopathy, a synucleinopathy, Batten disease, mucopolysaccharidosis type III, frontotemporal dementia, Parkinson's disease, corticobasal degeneration, progressive supranuclear palsy, chronic traumatic encephalopathy, Gaucher disease, Canavan disease, Tay-Sachs disease, Huntington's disease, Protocki-Lupski syndrome, amyotrophic lateral sclerosis, Down syndrome, Sanfilippo disease type A, Sanfilippo disease type B, or Rett syndrome.

163. The method of claim 161, comprising administering from 1×10⁵ to 5×10¹⁴ rAAVs per kg subject weight.

164. The method of claim 161, comprising systemically administering the rAAV to the subject.

165. The method of claim 161, comprising administering the rAAV via intravenous administration, intramuscular administration, intraperitoneal administration, or oral administration.
